(19) United States
(12) Patent Application Publication
(10) Pub. No.: US 2022/0380776 A1
(43) Pub. Date: Dec. 1, 2022

(54) BASE EDITOR-MEDIATED CD33 REDUCTION TO SELECTIVELY PROTECT THERAPEUTIC CELLS

(71) Applicants: Fred Hutchinson Cancer Center, Seattle, WA (US); University of Washington, Seattle, WA (US)

(72) Inventors: Olivier Humbert, Seattle, WA (US); Hans-Peter Kiem, Seattle, WA (US); Roland B. Walter, Seattle, WA (US); Andre Lieber, Seattle, WA (US); Chang Li, Seattle, WA (US)

(73) Assignees: Fred Hutchinson Cancer Center, Seattle, WA (US); University of Washington, Seattle, WA (US)

(21) Appl. No.: 17/771,128

(22) PCT Filed: Oct. 22, 2020
(86) PCT No.: PCT/US2020/056913

§ 371 Date: Apr. 22, 2022

Related U.S. Application Data
(63) Continuation-in-part of application No. PCT/US2020/040756, filed on Jul. 2, 2020.
(60) Provisional application No. 63/009,385, filed on Apr. 13, 2020.
(60) Provisional application No. 62/935,507, filed on Nov. 14, 2019.
(60) Provisional application No. 62/924,594, filed on Oct. 22, 2019.

(51) Int. Cl. C12N 15/113; C12N 5/00; C12N 5/0789; C12N 9/22

(52) U.S. Cl. CPC C12N 15/1138; C12N 5/0087; C12N 5/0647; C12N 9/22; C12N 2310/20

(57) ABSTRACT

Systems and methods to selectively protect therapeutic cells by reducing CD33 expression in the therapeutic cells using base editors and targeting non-therapeutic cells with an anti-CD33 therapy are described. The selective protection results in the enrichment of the therapeutic cells while simultaneously targeting any diseased, malignant and/or non-therapeutic CD33 expressing cells within a subject.

### CROSS-REFERENCE TO RELATED APPLICATIONS

[0001] This application is the 371 National Phase of PCT/2020/056913, filed Oct. 22, 2020, which claims the priority of U.S. Provisional Application No. 62/924,594, filed on Oct. 22, 2019; and is a continuation-in-part (CIP) of PCT/US2020/040756, filed Jul. 2, 2020, which claims the priority of U.S. Provisional Application No. 62/935,507, filed Nov. 14, 2019, and U.S. Provisional Application No. 63/009,385, filed Apr. 13, 2020. The disclosure of each of these earlier-filed applications is hereby incorporated by reference in its entirety.

### STATEMENT REGARDING FEDERALLY SPONSORED RESEARCH OR DEVELOPMENT

[0002] This invention was made with government support under contract HL136135 and HL128288 awarded by the National Institutes of Health. The government has certain rights in the invention.

### FIELD OF THE DISCLOSURE

[0003] The current disclosure provides systems and methods to selectively protect therapeutic cells by reducing CD33 expression in the therapeutic cells using a base-editing system and subsequently targeting non-therapeutic or unmodified native cells with an anti-CD33 therapy. The selective protection results in the enrichment of the therapeutic cells while simultaneously targeting any diseased, malignant and/or non-therapeutic CD33 expressing cells within a subject.

### BACKGROUND

[0004] In various therapeutic and experimental contexts, it can be desirable to selectively eliminate certain cells while selectively protecting others. Hematopoietic stem cells (HSC) are stem cells that can give rise to blood cell types. The therapeutic administration of HSCs can be used to treat a variety of adverse conditions including immune deficiency diseases, non-malignant blood disorders, cancers, infections, and radiation exposure (e.g., cancer treatment, accidental, or attack-based).

### SUMMARY

[0005] The present disclosure provides, among other things, methods and compositions related to the use of base editing for selective protection of therapeutic cells from an anti-CD33 agent. In various embodiments, base editing selectively protects therapeutic cells from an anti-CD33 agent by causing a reduction of CD33 expression as compared to a reference.

[0006] The current disclosure provides, among other things, systems and methods to selectively protect therapeutic cells by reducing CD33 expression in the therapeutic cells using a base-editing system and subsequently targeting non-therapeutic or unmodified native cells with an anti-CD33 therapy. The selective protection can result in enrichment of therapeutic cells while simultaneously targeting any diseased, malignant and/or non-therapeutic CD33 expressing cells within a subject.

[0007] The current disclosure provides systems and methods to protect beneficial therapeutic HSCs from anti-CD33 therapies while leaving residual diseased cells susceptible to anti-CD33 treatments. Various systems and methods achieve this benefit by using base editors (BE) to genetically modify HSC to have reduced or eliminated expression of CD33, thus protecting them from anti-CD33 based therapies. In this manner, genetically modified therapeutic cells will not be harmed by concurrent or subsequent anti-CD33 therapies a patient may receive. However, pre-existing CD33-expressing cells in the patient and/or administered cells that lack the genetic modification will not be protected, resulting in positive selection for the therapeutic cells over other cells. Importantly, use of BE introduces precise nucleotide substitutions and circumvents the need for DNA double strand breaks.

[0008] In particular embodiments, the HSC genetically modified to have reduced CD33 expression are also genetically modified for an additional therapeutic purpose. The genetic modification for an additional therapeutic purpose can provide a gene to treat a disorder such as an immune deficiency (e.g., Fanconi anemia, SCID, HIV), a cancer (e.g., leukemia, lymphoma, solid tumor), a blood-related disorder (e.g., sickle cell disease, SCD), a lysosomal storage disease (e.g., Pompe disease, Gaucher disease, Fabry disease, Mucopolysaccharidosis type I), or provide a therapeutic cassette that encodes a chimeric antigen receptor, engineered T-cell receptor, checkpoint inhibitor, or therapeutic antibody.

[0009] Methods, systems, and compositions of the present disclosure, which include among other things base editing systems for inactivation of CD33 and uses thereof, are characterized by a number of advantages, both in general and with respect to specific embodiments thereof (e.g., use of particular gRNAs). For example, base editing systems for inactivation of CD33 and uses thereof do not require double stranded breaks in CD33 DNA and for at least that reason are characterized by reduced risk of sequence damage and/or translocation associated, e.g., with CRISPR editing systems. Translocation is particularly problematic in the use of CRISPR when the editing system targets two or more genes or genomic loci and/or when the editing system includes two or more distinct gRNAs, which may lead to intra-chromosomal rearrangement. The present disclosure includes, among other things, embodiments in which a base editing system targets two or more genes or genomic loci and/or in which the base editing system includes two or more distinct gRNAs (e.g., for base editing of a nucleic acid encoding CD33 for CD33 inactivation and base editing of a second nucleic acid, such as where the editing has a therapeutic effect, e.g., increased or decreased expression of a gene or polypeptide of interest).

[0010] The genetic modification for an additional therapeutic purpose can provide a gene to treat a disorder, such as a rare hematology indication. Examples of rare hematology indications include, without limitation, rare platelet disorders (e.g. Bernard-Soulier syndrome and Glanzmann thrombasthenia), Bone marrow failure conditions (e.g., Diamond-Blackfan anemia), other red cell disorders (e.g., pyruvate kinase deficiency), autoimmune rare hematologies (e.g., acquired thrombotic thrombocytopenic purpura (aTTP) and congenital thrombotic thrombocytopenic purpura (cTTP)), Primary Immunodeficiencies (PIDs) (e.g., Wiskott-Aldrich syndrome (WAS), Severe combined immunodeficiency due to adenosine deaminase deficiency (ADA-SCID), X-linked severe combined immunodeficiency (SCID-X1), DOCK 8 deficiency, major histocompatibility complex class II deficiency (MHC-II), and CD40/CD40L deficiencies), and other indications that include inborn errors of metabolism (IEMs) (e.g., hereditary hemochromatosis and phenylketonuria (PKU)).

[0011] CRISPR editing systems can cause insertion and/or deletion of one or more nucleotides at editing target sites (e.g., sites corresponding to gRNAs of an editing system, e.g., genomic sequences of a targeted and/or edited cell), while in various embodiments base editing systems of the present disclosure do not cause insertion and/or deletion of one or more nucleotides at editing target sites, and/or cause insertion and/or deletion of one or more nucleotide positions at editing target sites at a reduced frequency as compared to a reference CRISPR editing system (e.g., a CRISPR editing system with a same or similar editing target site). In various embodiments, a base editing system of the present disclosure causes insertion and/or deletion of one more nucleotide positions at an editing target site in no more than 0.0001%, 0.001%, 0.01%, 0.1%, 1%, 2%, 3%, 4%, 5%, 10%, 15%, 20%, or 25% of target and/or edited cells, e.g., of a subject or system. In various embodiments, a base editing system of the present disclosure causes insertion and/or deletion of one more nucleotide positions at an editing target site at a frequency that is reduced as compared to a reference CRISPR editing system (e.g., a CRISPR editing system with a same or similar editing target site) by at least 1%, 5%, 10%, 15%, 20%, 30%, 40%, 50%, 75%, 100%, 2-fold, 3-fold, 4-fold, 5-fold, 10-fold, 50-fold, 100-fold, or more. Those of skill in the art will appreciate that a variety of tools and techniques are known in the art of measuring frequency of insertion and/or deletion of nucleotide positions at editing target sites and/or of mutation, including without limitation next generation sequencing. In various embodiments, each of the cells can include a single editing target site. In various embodiments each of the cells can include two or more editing target sites.

[0012] In various embodiments, base editing systems of the present disclosure do not cause a DNA emergency repair response, and/or cause a DNA emergency repair response that is reduced in emergency repair response agent activity and/or expression as compared to a reference CRISPR editing system (e.g., a CRISPR editing system with a same or similar editing target site, in a same or similar cell type). In various embodiments, a base editing system of the present disclosure causes a DNA emergency repair response that includes no greater than 10% emergency repair response agent activity and/or expression as compared to a reference CRISPR editing system (e.g., a CRISPR editing system with a same or similar editing target site) (e.g., no greater than 9%, 8%, 7%, 6%, 5%, 4%, 3%, 2%, or 1% emergency repair response agent activity and/or expression as compared to a reference CRISPR editing system, e.g., 1%-10% or 1%-5% emergency repair response agent activity and/or expression as compared to a reference CRISPR editing system).

[0013] In various embodiments, percent DNA emergency repair response agent expression is measured as the concentration or amount of DNA emergency repair response polypeptide in a sample from a subject or system as compared to a sample from a reference subject or system. In various embodiments, percent emergency repair response agent expression is measured as the concentration or amount of response agent-encoding messenger RNA in a sample from a subject or system as compared to a sample from a reference subject or system. In various embodiments, an emergency repair response agent is a DNA damage response agent. DNA damage response agents are known to those of skill in the art. In various embodiments, an emergency repair response agent is a DNA damage response agent can be or include without limitation UNG, SMUG1, MBD4, TDG, OGG1, MUTYH (MYH), NTHL1 (NTH1), MPG, NEIL1, NEIL2, NEIL3, APEX1 (APE1), APEX2, LIG3, XRCC1, PNKP, APLF, HMCES, PARP1 (ADPRT), PARP2 (ADPRTL2), PARP3 (ADPRTL3), PARG, PARPBP, MGMT, ALKBH2 (ABH2), ALKBH3 (DEPC1), TDP1, TDP2 (TTRAP), SPRTN (Spartan), MSH2, MSH3, MSH6, MLH1, PMS2, MSH4, MSH5, MLH3, PMS1, PMS2P3 (PMS2L3), HFM1, XPC, RAD23B, CETN2, RAD23A, XPA, DDB1, DDB2 (XPE), RPA1, RPA2, RPA3, TFIIHERCC3 (XPB), ERCC2 (XPD), GTF2H1, GTF2H2, GTF2H3, GTF2H4, GTF2H5 (TTDA), GTF2E2, CDK7, CCNH, MNAT1, ERCC5 (XPG), ERCC1, ERCC4 (XPF), LIG1, ERCC8 (CSA), ERCC6 (CSB), UVSSA (KIAA1530), XAB2 (HCNP), MMS19, RAD51, RAD51B, RAD51D, HELQ (HEL308), SWI5, SWSAP1, ZSWIM7 (SWS1), SPIDR, PDS5B, DMC1, XRCC2, XRCC3, RAD52, RAD54L, RAD54B, BRCA1, BARD1, ABRAXAS1, PAXIP1 (PTIP), SMC5, SMC6, SHLD1, SHLD2 (FAM35A), SHLD3, SEM1 (SHFM1) (DSS1), RAD50, MRE11A, NBN (NBS1), RBBP8 (CtIP), MUS81, EME1 (MMS4L), EME2, SLX1A (GIYD1), SLX1B (GIYD2), GEN1, FANCA, FANCB, FANCC, BRCA2 (FANCD1), FANCD2, FANCE, FANCF, FANCG (XRCC9), FANCI (KIAA1794), BRIP1 (FANCJ), FANCL, FANCM, PALB2 (FANCN), RAD51C (FANCO), SLX4(FANCP), FAAP20 (C1orf86), FAAP24 (C19orf40), FAAP100, UBE2T (FANCT), XRCC6 (Ku70), XRCCS (Ku80), PRKDC, LIG4, XRCC4, DCLRE1C (Artemis), NHEJ1 (XLF, Cernunnos), NUDT1 (MTH1), DUT, RRM2B (p53R2), PARK7 (DJ-1), DNPH1, NUDT15 (MTH2), NUDT18 (MTH3), POLA1, POLB, POLD1, POLD2, POLD3, POLD4, POLE (POLE1), POLE2, POLE3, POLE4, REV3L (POLZ), MAD2L2 (REV7), REV1 (REV1L), POLG, POLH, POLI (RAD30B), POLQ, POLK (DINB1), POLL, POLM, POLN (POL4P), PRIMPOL, DNTT, FEN1 (DNase IV), FAN1 (MTMR15), TREX1, TREX2, EXO1 (HEX1), APTX (aprataxin), SPO11, ENDOV, DNA2, DCLRE1A (SNM1A), DCLRE1B (SNM1B), EXOS, UBE2A (RAD6A), UBE2B (RAD6B), RAD18, SHPRH, HLTF (SMARCA3), RNF168, RNF8, RNF4, UBE2V2 (MMS2), UBE2N (UBC13), USP1, WDR48, HERC2, H2AX (H2AFX), CHAF1A (CAF1), SETMAR (METNASE), ATRX, BLM, RMI1, TOP3A, WRN, RECQL4, ATM, MPLKIP (TTDN1), RPA4, PRPF19 (PSO4), RECQL (RECQ1), RECQLS, RDM1 (RAD52B), NABP2 (SSB1), ATR, ATRIP, MDC1, PCNA, RAD1, RAD9A, HUS1, RAD17 (RAD24), CHEK1, CHEK2, TP53, TP53BP1 (53BP1), RIF1, TOPBP1, CLK2, and/or PER1.

[0014] In particular embodiments, the systems and methods described herein further provide systems and methods to reduce or eliminate the need for genotoxic conditioning. Currently, conditioning is used to remove a patient's existing hematopoietic system. All of the currently used conditioning regimens, however, whether myeloablative or nonmyeloablative, rely on the use of alkylating chemotherapy drugs and/or radiation such as involve total body irradiation (TBI) and/or cytotoxic drugs. Aside from any potential remaining residual cells, these conditioning regimens are also independently associated with an increased risk of developing malignancies, especially in DNA repair disorders like FA. These regimens are non-targeted, genotoxic, and have multiple short- and long-term adverse effects (La Nasa et al., Bone Marrow Transplant 36:971-975, 2005 and Chen et al., Blood. 107:3764-3771, 2006) such as an increased risk of developing DNA repair disorders, interstitial pneumonitis, idiopathic pulmonary fibrosis, reduced lung pulmonary function, renal damage, sinusoidal obstruction syndrome (SOS), infertility, cataract formation, hyperthyroidism, and thyroiditis (Gyurkocza et al., Blood. 124:344-353, 2014). Not only do these regimens result in impaired immune function, but they are associated with significant morbidity and mortality (Armitage, N Engl J Med. 1996; 330:827-837). Therefore, methods to reduce or eliminate the need for conditioning in these patients are desperately needed. In particular embodiments, the systems and methods allow the targeting and removal of any remaining CD33-expressing cells following conditioning in preparation for a hematopoietic cell transplant, bone marrow transplant, and/or administration of therapeutic cells (e.g., genetically-modified therapeutic cells). In particular embodiments, the systems and methods clear the bone marrow niche and allow for further expansion of gene-corrected cells. In particular embodiments, the systems and methods deplete residual disease-related cells. The therapeutically administered cells with reduced CD33 expression are protected from the CD33-targeting and are able to reconstitute the patient's blood and immune systems.

[0015] Thus, the systems and methods provide a selective protective advantage to the genetically modified cells as they reconstitute the patient's blood and immune systems while also allowing the continued use of anti-CD33 therapies to target remaining, diseased and/or malignant CD33-expressing cells within a subject as well as any administered cells lacking the intended genetic modification. In combination, the approaches disclosed herein can eliminate CD33-expressing cells, resulting in a completely gene-corrected hematopoiesis, and minimizing risks of future myeloid malignancy after gene therapy or allogeneic transplantation.

[0016] The base editors introduce precise nucleotide substitutions and circumvent the need for DNA double strand breaks. As described herein, different strategies for introducing non-sense and splicing mutations in CD33 were investigated. BE-treatment of human CD34+ HSPCs did not impair engraftment and differentiation in a mouse model, while reducing CD33 expression and protecting cells from in vivo gemtuzumab ozogamicin (GO) administration. Next-generation sequencing analysis of blood nucleated cells confirmed the persistence and specificity of BE-induced mutations in vivo. Together, the results validate the use of BE for the generation of CD33-engineered hematopoiesis to improve safety and efficacy of CD33-targeted therapies. BE can also target multiple sites simultaneously and can be used for in vivo selection of gene modified cells using CD33-directed immunotherapies. Thus, the systems and methods disclosed herein can be used to improve therapies involving blood bone marrow transplant (BMT), autologous cell therapies, and treatments for diseases associated with cellular expression of CD33.

### Definitions

[0017] A, An, The: As used herein, “a”, “an”, and “the” refer to one or to more than one (i.e., to at least one) of the grammatical object of the article. By way of example, “an element” discloses embodiments of exactly one element and embodiments including more than one element.

[0018] About: As used herein, term “about”, when used in reference to a value, refers to a value that is similar, in context to the referenced value. In general, those skilled in the art, familiar with the context, will appreciate the relevant degree of variance encompassed by “about” in that context. For example, in some embodiments, the term “about” may encompass a range of values that within 25%, 20%, 19%, 18%, 17%, 16%, 15%, 14%, 13%, 12%, 11%, 10%, 9%, 8%, 7%, 6%, 5%, 4%, 3%, 2%, 1%, or less of the referenced value.

[0019] Administration: As used herein, the term “administration” typically refers to administration of a composition to a subject or system to achieve delivery of an agent that is, or is included in, the composition.

[0020] Agent: As used herein, the term “agent” may refer to any chemical entity, including without limitation any of one or more of an atom, molecule, compound, amino acid, polypeptide, nucleotide, nucleic acid, protein, protein complex, liquid, solution, saccharide, polysaccharide, lipid, or combination or complex thereof.

[0021] Between or From: As used herein, the term “between” refers to content that falls between indicated upper and lower, or first and second, boundaries, inclusive of the boundaries. Similarly, the term “from”, when used in the context of a range of values, indicates that the range includes content that falls between indicated upper and lower, or first and second, boundaries, inclusive of the boundaries.

[0022] Binding: As used herein, the term “binding” refers to a non-covalent association between or among two or more agents. “Direct” binding involves physical contact between agents; indirect binding involves physical interaction by way of physical contact with one or more intermediate agents. Binding between two or more agents can occur and/or be assessed in any of a variety of contexts, including where interacting agents are studied in isolation or in the context of more complex systems (e.g., while covalently or otherwise associated with a carrier agents and/or in a biological system or cell).

[0023] Cancer: As used herein, the term “cancer” refers to a condition, disorder, or disease in which cells exhibit relatively abnormal, uncontrolled, and/or autonomous growth, so that they display an abnormally elevated proliferation rate and/or aberrant growth phenotype characterized by a significant loss of control of cell proliferation. In some embodiments, a cancer can include one or more tumors. In some embodiments, a cancer can be or include cells that are precancerous (e.g., benign), malignant, pre-metastatic, metastatic, and/or non-metastatic. In some embodiments, a cancer can be or include a solid tumor. In some embodiments, a cancer can be or include a hematologic tumor.

[0024] Chimeric antigen receptor: As used herein, “Chimeric antigen receptor” or “CAR” refers to an engineered protein that includes (i) an extracellular domain that includes a moiety that binds a target antigen; (ii) a transmembrane domain; and (iii) an intracellular signaling domain that sends activating signals when the CAR is stimulated by binding of the extracellular binding moiety with a target antigen. A T cell that has been genetically engineered to express a chimeric antigen receptor may be referred to as a CAR T cell. Thus, for example, when certain CARs are expressed by a T cell, binding of the CAR extracellular binding moiety with a target antigen can activate the T cell. CARs are also known as chimeric T cell receptors or chimeric immunoreceptors.

[0025] Combination therapy: As used herein, the term “combination therapy” refers to administration to a subject of to two or more agents or regimens such that the two or more agents or regimens together treat a condition, disorder, or disease of the subject. In some embodiments, the two or more agents or regimens can be administered simultaneously, sequentially, or in overlapping dosing regimens. Those of skill in the art will appreciate that combination therapy includes but does not require that the two agents or regimens be administered together in a single composition, nor at the same time.

[0026] Control expression or activity: As used herein, a first element (e.g., a protein, such as a transcription factor, or a nucleic acid sequence, such as promoter) “controls” or “drives” expression or activity of a second element (e.g., a protein or a nucleic acid encoding an agent such as a protein) if the expression or activity of the second element is wholly or partially dependent upon status (e.g., presence, absence, conformation, chemical modification, interaction, or other activity) of the first under at least one set of conditions. Control of expression or activity can be substantial control or activity, e.g., in that a change in status of the first element can, under at least one set of conditions, result in a change in expression or activity of the second element of at least 10% (e.g., at least 20%, 30%, 40%, 50%, 60%, 70%, 80%, 90%, 100%, 2-fold, 3-fold, 4-fold, 5-fold, 10-fold, 20-fold, 30-fold, 40-fold, 50-fold, 100-fold) as compared to a reference control.

[0027] Corresponding to: As used herein, the term “corresponding to” may be used to designate the position/identity of a structural element in a compound or composition through comparison with an appropriate reference compound or composition. For example, in some embodiments, a monomeric residue in a polymer (e.g., an amino acid residue in a polypeptide or a nucleic acid residue in a polynucleotide) may be identified as “corresponding to” a residue in an appropriate reference polymer. For example, those of skill in the art appreciate that residues in a provided polypeptide or polynucleotide sequence are often designated (e.g., numbered or labeled) according to the scheme of a related reference sequence (even if, e.g., such designation does not reflect literal numbering of the provided sequence). By way of illustration, if a reference sequence includes a particular amino acid motif at positions 100-110, and a second related sequence includes the same motif at positions 110-120, the motif positions of the second related sequence can be said to “correspond to” positions 100-110 of the reference sequence. Those of skill in the art appreciate that corresponding positions can be readily identified, e.g., by alignment of sequences, and that such alignment is commonly accomplished by any of a variety of known tools, strategies, and/or algorithms, including without limitation software programs such as, for example, BLAST, CS-BLAST, CUDASW++, DIAMOND, FASTA, GGSEARCH/GLSEARCH, Genoogle, HMMER, HHpred/HHsearch, IDF, Infernal, KLAST, USEARCH, parasail, PSI-BLAST, PSI-Search, ScalaBLAST, Sequilab, SAM, SSEARCH, SWAPHI, SWAPHI-LS, SWIMM, or SWIPE.

[0028] Dosing regimen: As used herein, the term “dosing regimen” can refer to a set of one or more same or different unit doses administered to a subject, typically including a plurality of unit doses, administration of each of which is separated from administration of the others by a period of time. In various embodiments, one or more or all unit doses of a dosing regimen may be the same or can vary (e.g., increase over time, decrease over time, or be adjusted in accordance with the subject and/or with a medical practitioner's determination). In various embodiments, one or more or all of the periods of time between each dose may be the same or can vary (e.g., increase over time, decrease over time, or be adjusted in accordance with the subject and/or with a medical practitioner's determination). In some embodiments, a given therapeutic agent has a recommended dosing regimen, which can involve one or more doses. Typically, at least one recommended dosing regimen of a marketed drug is known to those of skill in the art. In some embodiments, a dosing regimen is correlated with a desired or beneficial outcome when administered across a relevant population (i.e., is a therapeutic dosing regimen).

[0029] Downstream and Upstream: As used herein, the term“downstream” means that a first DNA region is closer, relative to a second DNA region, to the C-terminus of a nucleic acid that includes the first DNA region and the second DNA region. As used herein, the term “upstream” means a first DNA region is closer, relative to a second DNA region, to the N-terminus of a nucleic acid that includes the first DNA region and the second DNA region.

[0030] Effective amount: An “effective amount” is the amount of a formulation necessary to result in a desired physiological change in a subject. Effective amounts are often administered for research purposes.

[0031] Engineered: As used herein, the term “engineered” refers to the aspect of having been manipulated by the hand of man. For example, a polynucleotide is considered to be “engineered” when two or more sequences, that are not linked together in that order in nature, are manipulated by the hand of man to be directly linked to one another in the engineered polynucleotide. Those of skill in the art will appreciate that an “engineered” nucleic acid or amino acid sequence can be a recombinant nucleic acid or amino acid sequence, and can be referred to as “genetically engineered.” In some embodiments, an engineered polynucleotide includes a coding sequence and/or a regulatory sequence that is found in nature operably linked with a first sequence but is not found in nature operably linked with a second sequence, which is in the engineered polynucleotide operably linked in with the second sequence by the hand of man. In some embodiments, a cell or organism is considered to be “engineered” or “genetically engineered” if it has been manipulated so that its genetic information is altered (e.g., new genetic material not previously present has been introduced, for example by transformation, mating, somatic hybridization, transfection, transduction, or other mechanism, or previously present genetic material is altered or removed, for example by substitution, deletion, or mating). As is common practice and is understood by those of skill in the art, progeny or copies, perfect or imperfect, of an engineered polynucleotide or cell are typically still referred to as “engineered” even though the direct manipulation was of a prior entity.

[0032] Excipient: As used herein, “excipient” refers to a non-therapeutic agent that may be included in a pharmaceutical composition, for example to provide or contribute to a desired consistency or stabilizing effect. In some embodiments, suitable pharmaceutical excipients may include, for example, starch, glucose, lactose, sucrose, gelatin, malt, rice, flour, chalk, silica gel, sodium stearate, glycerol monostearate, talc, sodium chloride, dried skim milk, glycerol, propylene, glycol, water, ethanol, or the like.

[0033] Expression: As used herein, “expression” refers individually and/or cumulatively to one or more biological process that result in production from a nucleic acid sequence of an encoded agent, such as a protein. Expression specifically includes either or both of transcription and translation.

[0034] Fragment: As used herein, “fragment” refers a structure that includes and/or consists of a discrete portion of a reference agent (sometimes referred to as the “parent” agent). In some embodiments, a fragment lacks one or more moieties found in the reference agent. In some embodiments, a fragment includes or consists of one or more moieties found in the reference agent. In some embodiments, the reference agent is a polymer such as a polynucleotide or polypeptide. In some embodiments, a fragment of a polymer includes or consists of at least 3, 4, 5, 6, 7, 8, 9, 10, 11, 12, 13, 14, 15, 16, 17, 18, 19, 20, 25, 30, 35, 40, 45, 50, 55, 60, 65, 70, 75, 80, 85, 90, 95, 100, 110, 120, 130, 140, 150, 160, 170, 180, 190, 200, 210, 220, 230, 240, 250, 275, 300, 325, 350, 375, 400, 425, 450, 475, 500 or more monomeric units (e.g., residues) of the reference polymer. In some embodiments, a fragment of a polymer includes or consists of at least 5%, 10%, 15%, 20%, 25%, 30%, 25%, 40%, 45%, 50%, 55%, 60%, 65%, 70%, 75%, 80%, 85%, 90%, 95%, 96%, 97%, 98%, 99% or more of the monomeric units (e.g., residues) found in the reference polymer. A fragment of a reference polymer is not necessarily identical to a corresponding portion of the reference polymer. For example, a fragment of a reference polymer can be a polymer having a sequence of residues having at least 5%, 10%, 15%, 20%, 25%, 30%, 25%, 40%, 45%, 50%, 55%, 60%, 65%, 70%, 75%, 80%, 85%, 90%, 95%, 96%, 97%, 98%, 99% or more identity to the reference polymer. A fragment may, or may not, be generated by physical fragmentation of a reference agent. In some instances, a fragment is generated by physical fragmentation of a reference agent. In some instances, a fragment is not generated by physical fragmentation of a reference agent and can be instead, for example, produced by de novo synthesis or other means.

[0035] The term “gene” refers to a nucleic acid sequence (in various instances used interchangeably with polynucleotide or nucleotide sequence) that includes a coding sequence that encodes a therapeutic sequence, protein, or other expression product (such as an RNA product and/or a polypeptide product) as described herein, optionally together with some or all of regulatory sequences that control expression of the coding sequence. Gene sequences encoding a molecule can be DNA or RNA. As appropriate for the given context, these nucleic acid sequences may be a DNA strand sequence that is transcribed into RNA or an RNA sequence that is translated into protein. The nucleic acid sequences include both the full-length nucleic acid sequences as well as non-full-length sequences derived from the full-length protein. The gene sequence can be readily prepared by synthetic or recombinant methods. The definition of a gene includes various sequence polymorphisms; mutations; degenerate codons of the native sequence; sequences that may be introduced to provide codon preference in a specific cell type (e.g., codon optimized for expression in mammalian cells); and/or sequence variants wherein such alterations do not substantially affect the function of the encoded molecule. The term further can include all introns and other DNA sequences spliced from an mRNA transcript, along with variants resulting from alternative splice sites. Portions of complete gene sequences are referenced throughout the disclosure as is understood by one of ordinary skill in the art. Nucleotide sequences encoding other sequences disclosed herein can be readily determined by one of ordinary skill in the art. The term “gene” may include not only coding sequences but also coding sequences operably linked to each other and relevant regulatory sequences such as promoters, enhancers, and termination regions. For example, there can be a functional linkage between a regulatory sequence and an exogenous nucleic acid sequence resulting in expression of the latter. For another example, a first nucleic acid sequence can be operably linked with a second nucleic acid sequence when the first nucleic acid sequence is placed in a functional relationship with the second nucleic acid sequence. For instance, a promoter is operably linked to a coding sequence if the promoter affects the transcription or expression of the coding sequence. Generally, operably linked DNA sequences are contiguous and, where necessary or helpful, join coding regions into a common reading frame. In some embodiments, a gene includes non-coding sequence such as, without limitation, introns. In some embodiments, a gene may include both coding (e.g., exonic) and non-coding (e.g., intronic) sequences. In some embodiments, a gene includes a regulatory sequence that is a promoter. In some embodiments, a gene includes one or both of a (i) DNA nucleotides extending a predetermined number of nucleotides upstream of the coding sequence in a reference context, such as a source genome, and (ii) DNA nucleotides extending a predetermined number of nucleotides downstream of the coding sequence in a reference context, such as a source genome. In various embodiments, the predetermined number of nucleotides can be 500 bp, 1 kb, 2 kb, 3 kb, 4 kb, 5 kb, 10 kb, 20 kb, 30 kb, 40 kb, 50 kb, 75 kb, or 100 kb. As used herein, a “transgene” refers to a gene that is not endogenous or native to a reference context in which the gene is present or into which the gene may be placed by engineering.

[0036] Gene product or expression product: As used herein, the term “gene product” or “expression product” generally refers to an RNA transcribed from the gene (pre- and/or post-processing) or a polypeptide (pre- and/or post-modification) encoded by an RNA transcribed from the gene.

[0037] Host cell, target cell: As used herein, “host cell” refers to a cell into which exogenous DNA (recombinant or otherwise), such as a transgene, has been introduced. Those of skill in the art appreciate that a “host cell” can be the cell into which the exogenous DNA was initially introduced and/or progeny or copies, perfect or imperfect, thereof. In some embodiments, a host cell includes one or more viral genes or transgenes. In some embodiments, an intended or potential host cell can be referred to as a target cell.

[0038] In various embodiments, a host cell or target cell is identified by the presence, absence, or expression level of various surface markers.

[0039] A statement that a cell or population of cells is “positive” for or expressing a particular marker refers to the detectable presence on or in the cell of the particular marker. When referring to a surface marker, the term can refer to the presence of surface expression as detected by flow cytometry, for example, by staining with an antibody that specifically binds to the marker and detecting said antibody, wherein the staining is detectable by flow cytometry at a level substantially above the staining detected carrying out the same procedure with an isotype-matched control under otherwise identical conditions and/or at a level substantially similar to that for cell known to be positive for the marker, and/or at a level substantially higher than that for a cell known to be negative for the marker.

[0040] A statement that a cell or population of cells is “negative” for a particular marker or lacks expression of a marker refers to the absence of substantial detectable presence on or in the cell of a particular marker. When referring to a surface marker, the term can refer to the absence of surface expression as detected by flow cytometry, for example, by staining with an antibody that specifically binds to the marker and detecting said antibody, wherein the staining is not detected by flow cytometry at a level substantially above the staining detected carrying out the same procedure with an isotype-matched control under otherwise identical conditions, and/or at a level substantially lower than that for cell known to be positive for the marker, and/or at a level substantially similar as compared to that for a cell known to be negative for the marker.

[0041] Identity: As used herein, the term “identity” refers to the overall relatedness between polymeric molecules, e.g., between nucleic acid molecules (e.g., DNA molecules and/or RNA molecules) and/or between polypeptide molecules. “% sequence identity” can refer to a relationship between two or more sequences, as determined by comparing the sequences. Methods for the calculation of a percent identity as between two provided sequences are known in the art. The term “% sequence identity” refers to a relationship between two or more sequences, as determined by comparing the sequences. In the art, “identity” also means the degree of sequence relatedness between protein, nucleic acid, or gene sequences as determined by the match between strings of such sequences. “Identity” (often referred to as “similarity”) can be readily calculated by known methods, including those described in: Computational Molecular Biology (Lesk, A. M., ed.) Oxford University Press, N Y (1988); Biocomputing: Informatics and Genome Projects (Smith, D. W., ed.) Academic Press, N Y (1994); Computer Analysis of Sequence Data, Part I (Griffin, A. M., and Griffin, H. G., eds.) Humana Press, N J (1994); Sequence Analysis in Molecular Biology (Von Heijne, G., ed.) Academic Press (1987); and Sequence Analysis Primer (Gribskov, M. and Devereux, J., eds.) Oxford University Press, NY (1992). Preferred methods to determine identity are designed to give the best match between the sequences tested. Methods to determine identity and similarity are codified in publicly available computer programs. For instance, calculation of the percent identity of two nucleic acid or polypeptide sequences, for example, can be performed by aligning the two sequences (or the complement of one or both sequences) for optimal comparison purposes (e.g., gaps can be introduced in one or both of a first and a second sequences for optimal alignment and non-identical sequences can be disregarded for comparison purposes). The nucleotides or amino acids at corresponding positions are then compared. When a position in the first sequence is occupied by the same residue (e.g., nucleotide or amino acid) as the corresponding position in the second sequence, then the molecules are identical at that position. The percent identity between the two sequences is a function of the number of identical positions shared by the sequences, optionally accounting for the number of gaps, and the length of each gap, which may need to be introduced for optimal alignment of the two sequences. The comparison of sequences and determination of percent identity between two sequences can be accomplished using a computational algorithm, such as BLAST (basic local alignment search tool). Sequence alignments and percent identity calculations may be performed using the Megalign program of the LASERGENE bioinformatics computing suite (DNASTAR, Inc., Madison, Wis.). Multiple alignment of the sequences can also be performed using the Clustal method of alignment (Higgins and Sharp CABIOS, 5, 151-153 (1989) with default parameters (GAP PENALTY=10, GAP LENGTH PENALTY=10). Relevant programs also include the GCG suite of programs (Wisconsin Package Version 9.0, Genetics Computer Group (GCG), Madison, Wis.); BLASTP, BLASTN, BLASTX (Altschul et al., J. Mol. Biol. 215:403-410 (1990); DNASTAR (DNASTAR, Inc., Madison, Wis.); and the FASTA program incorporating the Smith-Waterman algorithm (Pearson, Comput. Methods Genome Res., [Proc. Int. Symp.] (1994), Meeting Date 1992, 111-20. Editor(s): Suhai, Sandor. Publisher: Plenum, New York, N.Y. Within the context of this disclosure it will be understood that where sequence analysis software is used for analysis, the results of the analysis are based on the “default values” of the program referenced. As used herein “default values” will mean any set of values or parameters, which originally load with the software when first initialized.

[0042] “Improve,” “increase,” “inhibit,” or “reduce”: As used herein, the terms “improve”, “increase”, “inhibit”, and “reduce”, and grammatical equivalents thereof, indicate qualitative or quantitative difference from a reference.

[0043] Isolated: As used herein, “isolated” refers to a substance and/or entity that has been (1) separated from at least some of the components with which it was associated when initially produced (whether in nature and/or in an experimental setting), and/or (2) designed, produced, prepared, and/or manufactured by the hand of man. Isolated substances and/or entities may be separated from 10%, 20%, 30%, 40%, 50%, 60%, 70%, 80%, 90%, 91%, 92%, 93%, 94%, 95%, 96%, 97%, 98%, 99%, or more than 99% of the other components with which they were initially associated. In some embodiments, isolated agents are 80%, 85%, 90%, 91%, 92%, 93%, 94%, 95%, 96%, 97%, 98%, 99%, or more than 99% pure. As used herein, a substance is “pure” if it is substantially free of other components. In some embodiments, as will be understood by those skilled in the art, a substance may still be considered “isolated” or even “pure”, after having been combined with certain other components such as, for example, one or more carriers or excipients (e.g., buffer, solvent, water, etc.); in such embodiments, percent isolation or purity of the substance is calculated without including such carriers or excipients. To give but one example, in some embodiments, a biological polymer such as a polypeptide or polynucleotide that occurs in nature is considered to be “isolated” when, a) by virtue of its origin or source of derivation is not associated with some or all of the components that accompany it in its native state in nature; b) it is substantially free of other polypeptides or nucleic acids of the same species from the species that produces it in nature; c) is expressed by or is otherwise in association with components from a cell or other expression system that is not of the species that produces it in nature. Thus, for instance, in some embodiments, a polypeptide that is chemically synthesized or is synthesized in a cellular system different from that which produces it in nature is considered to be an “isolated” polypeptide. Alternatively or additionally, in some embodiments, a polypeptide that has been subjected to one or more purification techniques may be considered to be an “isolated” polypeptide to the extent that it has been separated from other components a) with which it is associated in nature; and/or b) with which it was associated when initially produced.

[0044] Operably linked: As used herein, “operably linked” or “operatively linked” refers to the association of at least a first element and a second element such that the component elements are in a relationship permitting them to function in their intended manner. For example, a nucleic acid regulatory sequence is “operably linked” to a nucleic acid coding sequence if the regulatory sequence and coding sequence are associated in a manner that permits control of expression of the coding sequence by the regulatory sequence. In some embodiments, an “operably linked” regulatory sequence is directly or indirectly covalently associated with a coding sequence (e.g., in a single nucleic acid). In some embodiments, a regulatory sequence controls expression of a coding sequence in trans and inclusion of the regulatory sequence in the same nucleic acid as the coding sequence is not a requirement of operable linkage.

[0045] Pharmaceutically acceptable: As used herein, the term “pharmaceutically acceptable,” as applied to one or more, or all, component(s) for formulation of a composition as disclosed herein, means that each component must be compatible with the other ingredients of the composition and not deleterious to the recipient thereof.

[0046] Pharmaceutically acceptable carrier: As used herein, the term “pharmaceutically acceptable carrier” refers to a pharmaceutically-acceptable material, composition, or vehicle, such as a liquid or solid filler, diluent, excipient, or solvent encapsulating material, that facilitates formulation of an agent (e.g., a pharmaceutical agent), modifies bioavailability of an agent, or facilitates transport of an agent from one organ or portion of a subject to another. Some examples of materials which can serve as pharmaceutically-acceptable carriers include: sugars, such as lactose, glucose and sucrose; starches, such as corn starch and potato starch; cellulose, and its derivatives, such as sodium carboxymethyl cellulose, ethyl cellulose and cellulose acetate; powdered tragacanth; malt; gelatin; talc; excipients, such as cocoa butter and suppository waxes; oils, such as peanut oil, cottonseed oil, safflower oil, sesame oil, olive oil, corn oil and soybean oil; glycols, such as propylene glycol; polyols, such as glycerin, sorbitol, mannitol and polyethylene glycol; esters, such as ethyl oleate and ethyl laurate; agar; buffering agents, such as magnesium hydroxide and aluminum hydroxide; alginic acid; pyrogen-free water; isotonic saline; Ringer's solution; ethyl alcohol; pH buffered solutions; polyesters, polycarbonates and/or polyanhydrides; and other non-toxic compatible substances employed in pharmaceutical formulations.

[0047] Pharmaceutical composition: As used herein, the term “pharmaceutical composition” refers to a composition in which an active agent is formulated together with one or more pharmaceutically acceptable carriers.

[0048] Promoter: As used herein, a “promoter” or “promoter sequence” can be a DNA regulatory region that directly or indirectly (e.g., through promoter-bound proteins or substances) participates in initiation and/or processivity of transcription of a coding sequence. A promoter may, under suitable conditions, initiate transcription of a coding sequence upon binding of one or more transcription factors and/or regulatory moieties with the promoter. A promoter that participates in initiation of transcription of a coding sequence can be “operably linked” to the coding sequence. In certain instances, a promoter can be or include a DNA regulatory region that extends from a transcription initiation site (at its 3′ terminus) to an upstream (5′ direction) position such that the sequence so designated includes one or both of a minimum number of bases or elements necessary to initiate a transcription event. A promoter may be, include, or be operably associated with or operably linked to, expression control sequences such as enhancer and repressor sequences. In some embodiments, a promoter may be inducible. In some embodiments, a promoter may be a constitutive promoter. In some embodiments, a conditional (e.g., inducible) promoter may be unidirectional or bi-directional. A promoter may be or include a sequence identical to a sequence known to occur in the genome of particular species. In some embodiments, a promoter can be or include a hybrid promoter, in which a sequence containing a transcriptional regulatory region can be obtained from one source and a sequence containing a transcription initiation region can be obtained from a second source. Systems for linking control elements to coding sequence within a transgene are well known in the art (general molecular biological and recombinant DNA techniques are described in Sambrook, Fritsch, and Maniatis, Molecular Cloning: A Laboratory Manual, Second Edition, Cold Spring Harbor Laboratory Press, Cold Spring Harbor, N.Y., 1989).

[0049] Reference: As used herein, “reference” refers to a standard or control relative to which a comparison is performed. For example, in some embodiments, an agent, sample, sequence, subject, animal, or individual, or population thereof, or a measure or characteristic representative thereof, is compared with a reference, an agent, sample, sequence, subject, animal, or individual, or population thereof, or a measure or characteristic representative thereof. In some embodiments, a reference is a measured value. In some embodiments, a reference is an established standard or expected value. In some embodiments, a reference is a historical reference. A reference can be quantitative of qualitative. Typically, as would be understood by those of skill in the art, a reference and the value to which it is compared represents measure under comparable conditions. Those of skill in the art will appreciate when sufficient similarities are present to justify reliance on and/or comparison. In some embodiments, an appropriate reference may be an agent, sample, sequence, subject, animal, or individual, or population thereof, under conditions those of skill in the art will recognize as comparable, e.g., for the purpose of assessing one or more particular variables (e.g., presence or absence of an agent or condition), or a measure or characteristic representative thereof.

[0050] Obtained values for parameters associated with a therapy described herein can be compared to a reference level derived from a control population, and this comparison can indicate whether a therapy described herein is effective for a subject in need thereof. Reference levels can be obtained from one or more relevant datasets from a control population. A “dataset” as used herein is a set of numerical values resulting from evaluation of a sample (or population of samples) under a desired condition. The values of the dataset can be obtained, for example, by experimentally obtaining measures from a sample and constructing a dataset from these measurements. As is understood by one of ordinary skill in the art, the reference level can be based on e.g., any mathematical or statistical formula useful and known in the art for arriving at a meaningful aggregate reference level from a collection of individual data points; e.g., mean, median, median of the mean, etc. Alternatively, a reference level or dataset to create a reference level can be obtained from a service provider such as a laboratory, or from a database or a server on which the dataset has been stored.

[0051] A reference level from a dataset can be derived from previous measures derived from a control population. A “control population” is any grouping of subjects or samples of like specified characteristics. The grouping could be according to, for example, clinical parameters, clinical assessments, therapeutic regimens, disease status, severity of condition, etc. In particular embodiments, the grouping is based on age range (e.g., 0-2 years) and non-immunocompromised status. In particular embodiments, a normal control population includes individuals that are age-matched to a test subject and non-immune compromised. In particular embodiments, age-matched includes, e.g., 0-6 months old; 0-2 years old; 0-10 years old; 10-15 years old, 60-65 years old, 70-85 years old, etc., as is clinically relevant under the circumstances. In particular embodiments, a control population can include those that have an immune deficiency and have not been administered a therapeutically effective amount

[0052] In particular embodiments, the relevant reference level for values of a particular parameter associated with a therapy described herein is obtained based on the value of a particular corresponding parameter associated with a therapy in a control population to determine whether a therapy disclosed herein has been therapeutically effective for a subject in need thereof.

[0053] In particular embodiments, conclusions are drawn based on whether a sample value is statistically significantly different or not statistically significantly different from a reference level. A measure is not statistically significantly different if the difference is within a level that would be expected to occur based on chance alone. In contrast, a statistically significant difference or increase is one that is greater than what would be expected to occur by chance alone. Statistical significance or lack thereof can be determined by any of various methods well-known in the art. An example of a commonly used measure of statistical significance is the p-value. The p-value represents the probability of obtaining a given result equivalent to a particular data point, where the data point is the result of random chance alone. A result is often considered significant (not random chance) at a p-value less than or equal to 0.05. In particular embodiments, a sample value is “comparable to” a reference level derived from a normal control population if the sample value and the reference level are not statistically significantly different.

[0054] Regulatory sequence: As used herein in the context of expression of a nucleic acid coding sequence, a regulatory sequence is a nucleic acid sequence that controls expression of a coding sequence. In some embodiments, a regulatory sequence can control or impact one or more aspects of gene expression (e.g., cell-type-specific expression, inducible expression, etc.).

[0055] Subject: As used herein, the term “subject” refers to an organism, typically a mammal (e.g., a human, rat, or mouse). In some embodiments, a subject is suffering from a disease, disorder or condition. In some embodiments, a subject is susceptible to a disease, disorder, or condition. In some embodiments, a subject displays one or more symptoms or characteristics of a disease, disorder or condition. In some embodiments, a subject is not suffering from a disease, disorder or condition. In some embodiments, a subject does not display any symptom or characteristic of a disease, disorder, or condition. In some embodiments, a subject has one or more features characteristic of susceptibility to or risk of a disease, disorder, or condition. In some embodiments, a subject is a subject that has been tested for a disease, disorder, or condition, and/or to whom therapy has been administered. In some instances, a human subject can be interchangeably referred to as a “patient” or “individual.”

[0056] Therapeutic agent: As used herein, the term “therapeutic agent” refers to any agent that elicits a desired pharmacological effect when administered to a subject. In some embodiments, an agent is considered to be a therapeutic agent if it demonstrates a statistically significant effect across an appropriate population. In some embodiments, the appropriate population can be a population of model organisms or a human population. In some embodiments, an appropriate population can be defined by various criteria, such as a certain age group, gender, genetic background, preexisting clinical conditions, etc. In some embodiments, a therapeutic agent is a substance that can be used for treatment of a disease, disorder, or condition. In some embodiments, a therapeutic agent is an agent that has been or is required to be approved by a government agency before it can be marketed for administration to humans. In some embodiments, a therapeutic agent is an agent for which a medical prescription is required for administration to humans.

[0057] Therapeutically effective amount: As used herein, “therapeutically effective amount” or an “effective amount” refers to an amount of an agent or formulation necessary or sufficient to result in a desired physiological change in a subject or population. Effective amounts are often administered for research purposes. In some embodiments, a therapeutically effective amount is one that reduces the incidence and/or severity of, and/or delays onset of, one or more symptoms of the disease, disorder, and/or condition. Those of ordinary skill in the art will appreciate that the term “therapeutically effective amount” does not in fact require successful treatment be achieved in a particular individual. Rather, a therapeutically effective amount may be that amount that provides a particular desired pharmacological response in a significant number of subjects when administered to patients in need of such treatment. In some embodiments, reference to a therapeutically effective amount may be a reference to an amount as measured in one or more specific tissues (e.g., a tissue affected by the disease, disorder or condition) or fluids (e.g., blood, saliva, serum, sweat, tears, urine, etc.). Those of ordinary skill in the art will appreciate that, in some embodiments, a therapeutically effective amount of a particular agent or therapy may be formulated and/or administered in a single dose. In some embodiments, a therapeutically effective agent may be formulated and/or administered in a plurality of doses, for example, as part of a dosing regimen.

[0058] Treatment: As used herein, the term “treatment” (also “treat” or “treating”) refers to administration of a therapy that partially or completely alleviates, ameliorates, relieves, inhibits, delays onset of, reduces severity of, and/or reduces incidence of one or more symptoms, features, and/or causes of a particular disease, disorder, or condition, or is administered for the purpose of achieving any such result. In some embodiments, treatment can be of a subject who does not exhibit signs of the relevant disease, disorder, or condition and/or of a subject who exhibits only early signs of the disease, disorder, or condition. Alternatively or additionally, such treatment can be of a subject who exhibits one or more established signs of the relevant disease, disorder and/or condition. In some embodiments, treatment can be of a subject who has been diagnosed as suffering from the relevant disease, disorder, and/or condition. In some embodiments, treatment can be of a subject known to have one or more susceptibility factors that are statistically correlated with increased risk of development of the relevant disease, disorder, or condition. A “prophylactic treatment” includes a treatment administered to a subject who does not display signs or symptoms of a condition to be treated or displays only early signs or symptoms of the condition to be treated such that treatment is administered for the purpose of diminishing, preventing, or decreasing the risk of developing the condition. Thus, a prophylactic treatment functions as a preventative treatment against a condition. A “therapeutic treatment” includes a treatment administered to a subject who displays symptoms or signs of a condition and is administered to the subject for the purpose of reducing the severity or progression of the condition.

[0059] Unit dose: As used herein, the term “unit dose” refers to an amount administered as a single dose and/or in a physically discrete unit of a pharmaceutical composition. In many embodiments, a unit dose contains a predetermined quantity of an active agent, for instance a predetermined viral titer (the number of viruses, virions, or viral particles in a given volume). In some embodiments, a unit dose contains an entire single dose of the agent. In some embodiments, more than one unit dose is administered to achieve a total single dose. In some embodiments, administration of multiple unit doses is required, or expected to be required, in order to achieve an intended effect. A unit dose can be, for example, a volume of liquid (e.g., an acceptable carrier) containing a predetermined quantity of one or more therapeutic moieties, a predetermined amount of one or more therapeutic moieties in solid form, a sustained release formulation or drug delivery device containing a predetermined amount of one or more therapeutic moieties, etc. It will be appreciated that a unit dose can be present in a formulation that includes any of a variety of components in addition to the therapeutic moiety(s). For example, acceptable carriers (e.g., pharmaceutically acceptable carriers), diluents, stabilizers, buffers, preservatives, etc., can be included. It will be appreciated by those skilled in the art, in many embodiments, a total appropriate daily dosage of a particular therapeutic agent can include a portion, or a plurality, of unit doses, and can be decided, for example, by a medical practitioner within the scope of sound medical judgment. In some embodiments, the specific effective dose level for any particular subject or organism can depend upon a variety of factors including the disorder being treated and the severity of the disorder; activity of specific active compound employed; specific composition employed; age, body weight, general health, sex, and diet of the subject; time of administration, and rate of excretion of the specific active compound employed; duration of the treatment; drugs and/or additional therapies used in combination or coincidental with specific compound(s) employed, and like factors well known in the medical arts.

[0060] Vector: A “vector” is a nucleic acid molecule that is capable of transporting another nucleic acid molecule (including without limitation a nucleic acid molecule that is a fragment of the vector), such as a gene encoding a therapeutic gene.

### BRIEF DESCRIPTION OF THE DRAWINGS

[0061] FIG. 1 is an annotated alignment of protein sequences for CD33 proteins (amino-terminus through the transmembrane domain, but not including the cytoplasmic domain) from (in order from top to bottom) Macaca fascicularis (SEQ ID NO: 1), Homo sapiens (SEQ ID NO: 2), and Mus musculus (SEQ ID NO: 3). Full length sequences are shown in SEQ ID NOs: 170, 14, and 171, respectively.

[0062] FIGS. 2A-2B. FIG. 2A is a schematic drawing of antibody targeting of CD33. FIG. 2B is a depiction of the anti-CD33 antibody-drug conjugate gemtuzumab ozogamicin (GO).

[0063] FIGS. 3A-3B illustrate an exemplary base-editing strategy to reduce or inactivate CD33 expression. FIG. 3A illustrates generally how a cytidine base editor (CBE) functions to switch C with T. FIG. 3B illustrates an embodiment of using a CBE to inactivate the intron1 splicing donor site of CD33 (5′-to-3′ sequence in SEQ ID NO: 4; corresponding gRNA shown in SEQ ID NO: 194), and an embodiment of using a CBE to introduce a stop codon into exon 2 of CD33 (5′-to-3′ sequence in SEQ ID NO: 5; corresponding gRNA shown in SEQ ID NO: 195).

[0064] FIGS. 4A-4B. FIG. 4A illustrates elements used in the analysis of CBE modification of CD33, including electroporation to introduce CBE mRNA to target cells, and analysis of the resultant cells by CD33 surface-expression flow cytometry as well as editing efficiency using next generation sequencing (NGS). FIG. 4B is a graph showing percent of CD33 expression in human CD34+ HSPCs, measured using CD33 surface expression flow cytometry, through the indicated time course. Cells were edited with Cas9 only (solid circles), CBE at E2 (X), CBE at E1 (solid triangles), and CRISPR (solid squares).

[0065] FIGS. 5A-5C. Editing efficiency of CD33 CBE in human CD34+ HSPCs. FIG. 5A shows a schematic illustrating the results of CRISPR/Cas9-mediated E2 deletion in CD33 (top panel); and a graph of percent of CD33 expression in CD34+ HSPCs, measured using CD33 surface expression flow cytometry, in cells treated with Cas9 only (negative control) and the complete CRISPR system. FIG. 5B is a pair of graphs illustrating the specific base changes produced by CBE editing of E1 (SEQ ID NO: 193); the left panel shows results from cells treated with Cas9 only (negative control), which shows essentially no changes; and the right panel shows results from cells treated with the full CBE system to edit E1, which shows editing of up to about 30% at the targeted G residue, with lower (10-15% editing) at the two 5′ G positions. FIG. 5C is a pair of graphs illustrating the specific base changes produced by CBE editing of E2 (SEQ ID NO: 13); the left panel shows results from cells treated with Cas9 only (negative control), which shows essentially no changes; and the right panel shows results from cells treated with the full CBE system to edit E2, which shows editing of up to about 8% at the targeted G residue.

[0066] FIG. 6 illustrates a system used for examining engraftment of CBE-treated human CD34+ HSPCs in a mouse transplantation model. The top panel is a table showing the four treatment groups; the bottom panel illustrates the timing for injections and testing in the mice.

[0067] FIG. 7 is a pair of graphs showing results from the experimental system illustrated in FIG. 6, illustrating normal engraftment and differentiation of CBE-treated CD34+ HSPCs through the 18 weeks tested, including in the CD14+ sub-fraction of human CD45+ cells (bottom graph).

[0068] FIGS. 8A-8B illustrate that CBE editing and CD33 knockdown are persistent in vivo. FIG. 8A shows, in the first graph, the percent of CD33 expression in CD14+ cells treated with Cas9 only (solid circles), CBE at E2 (X's), CBE at E1 (solid triangles), and CRISPR (solid squares) over an 18 week time course after edited cells were introduced into mice. Side graphs illustrate the specific nucleotide edits found at 10 weeks in a specific mouse (#1874) that received cells edited at E2 using CBE, at 10 weeks in a specific mouse (#1904) that received cells edited at E1 using CBE, and the percent of CD33 E2 deletion persisting in the mice treated with CRISPR-edited cells at 18 weeks post treatment. FIG. 8B is a graph showing the percentage of CD33 expression in mice treated with the indicated edited cells, over 12 days post-infusion.

[0069] FIGS. 9A-9B are a pair of graphs, showing correlation between in vivo CD33 editing levels and protection from GO-induced cytotoxicity. Three mice per group were treated with GO (FIG. 9A), and a sharp decrease in the number of CD14+ monocytes was observed 1 wk post treatment, showing that the drug is active. Interestingly, the magnitude of the decrease was inversely correlated with editing efficiency. The sharper decrease was seen in the control group and a smaller effect was observed in the CRISPR group where editing efficiency was highest. The recovery in CD14+ cell number over time suggests that progenitor or stem cells are able to replenish the pool of monocytes and were thus not affected by treatment. FIG. 9B shows the parallel control experiment, without GO treatment.

[0070] FIGS. 10A-10B are a pair of graphs showing recovery of CD33 expression in HSCs after treatment, in the same experiment shown in FIGS. 9A-9B.

[0071] FIGS. 11A-11B are a pair of graphs showing that GO has no effect on CD33 negative cell lineages, in the same experiment shown in FIGS. 9A-9B.

[0072] FIGS. 12A and 12B are schematic drawings of the ABE8e (FIG. 12A; Addgene #138489; SEQ ID NO: 6) and the ABE8e-NG (FIG. 12B; Addgene #138491; SEQ ID NO: 7) plasmids. The development of these plasmids is described in Richter et al. (Nat. Biotech. 38(7):883-891, 2020).

[0073] FIGS. 13A-13B illustrate a system for targeting of two gamma globin (HBG) promoter target sites (−113 and −175) with ABE8e in nonhuman primate NHP CD34+ cells for the reactivation of fetal hemoglobin. FIG. 13A is a schematic of HBG target sites (5′-to-3′ sequences in SEQ ID NOs: 8 and 9). FIG. 13B is a pair of sequencing chromatograms showing editing efficiency measured by EditR analysis (Kluesner et al., CIRSPR J. 1(3):239-250, 2018; PMID: 31021262) (SEQ ID NOs: 10 and 11). Arrows show the position of edits; starred (★) boxes show frequencies of the targeted edits.

[0074] FIGS. 14A-14F show efficient CD33 knockdown with ABE8e. FIG. 14A shows targeting of CD33 splicing site (exon2 acceptor site) with ABE8e in NHP CD34+ cells (5′-to-3′ sequence in SEQ ID NO: 12). FIG. 14B is an illustration of conservation of the 3′ acceptor site; the AG that are boxed are universal, and therefore an excellent target for editing. The splicing acceptor site in exon 2 is inactivated, by editing the AG donor site to GG. FIG. 14C-14E show the editing efficiency of the CD33 target site, measured by EditR, in non-human primate (NHP) CD34+ cells mock treated (FIG. 14C), treated with ABE8e protein (FIG. 14D) or with ABE8e mRNA (FIG. 14E). Arrows show the position of edits; starred (★) boxes show frequencies. FIG. 14F shows flow cytometry analysis of CD33 surface expression in NHP CD34+ cells at six days post-treatment. (T234 rhesus CD34+ (6 days post EP)). SEQ ID NO: 13 is shown in each of FIGS. 14C, 14D, and 14E.

[0075] FIGS. 15A, 15B are a pair of graphs illustrating multiplex ABE8e HBG/CD33 editing in human fetal liver (FL) CD34+ cells. Cells were edited with ABE8e mRNA and single guide RNA (sgRNA) targeting the CD33 and HBG-175 sites. Editing efficiency was measured by next generation sequencing (NGS) at the CD33 (FIGS. 15A and 15B) or HBG-175 (FIGS. 15C-15E) sites. Graphs show editing frequency at each nucleotide within the target site. For CD33 in FIG. 15A, the C-to-T variation is due to a natural variant not induced by editing. FIG. 15F is a bar graphs showing there is minimal impact of multiplex editing on the capacity of human FLCD34+ cells to differentiate, using a colony forming analysis system. Cells were plated in a colony forming assay to evaluate the impact of editing on HSC multilineage differentiation. The graph shows the number of each type of differentiated cell (GEMM: granulocyte, erythroid macrophage, and megakaryocyte, GM: granulocyte-macrophage, G: granulocyte, M: macrophage, or BFU-E: burst-forming unit-erythrocyte) counted in colonies formed from plating edited 400 cells.

[0076] FIGS. 16A-16D is a series of graphs illustrating multiplex ABE8e HBG/CD33 editing in human mobilized peripheral blood (mPB) CD34+ cells. Cells were edited with ABE8e mRNA and single guide RNA (sgRNA) targeting each of the CD33 and HBG-175 sites. Editing efficiency was measured by EditR at the CD33 or HBG-175 sites. Arrows show the position of edits; starred (★) boxes show editing frequencies. SEQ ID NO: 13 is shown in each of FIGS. 16A and 16B; SEQ ID NO: 11 is shown in each of FIGS. 16C and 16D.

[0077] FIGS. 17A-17E illustrate ABE8e CD33 editing in NHP CD34+ cells. Cells were edited with two different concentrations (high and low) of ABE8e mRNA and single guide RNA (sgRNA) targeting CD33. FIG. 17A is three panels showing editing efficiency measured by EditR. Arrows show the position of edits, and starred (★) boxes show editing frequencies; SEQ ID NO: 13 is shown in all three sequencing chromatograms. FIG. 17B is a bar graph showing percentage of CD33 expression in the same edited cells, measured by flow cytometry analysis. FIG. 17C is a bar graphs showing there is minimal impact of CD8e editing using either high or low mRNA on the capacity of human FLCD34+ cells to differentiate, measured using a colony forming analysis system. Cells were plated in a colony forming assay to evaluate the impact of editing on HSC multilineage differentiation, as in FIG. 15B. FIG. 17D is a schematic drawing of mono- vs. bi-allelic CD33 editing; 5′-to-3′ sequence in SEQ ID NO: 12. FIG. 17E is a pair of pie graphs showing the percentage of mono- vs. bi-allelic CD33 editing frequencies (in treated NHP CD34+ cells) measured in single colonies (n=49) at either targeted adenine.

[0078] FIGS. 18A-18B illustrate multiplex ABE8e HBG/CD33 editing in NHP CD34+ cells and analysis of single- vs. double-edits at a single cell level. FIG. 18A is an outline of the experimental procedure. FIG. 18B is a pie graph showing the frequency of single- vs. double-edits in derived colonies (n=46) from treated CD34+ cells. Over half of the colonies show editing at both targets.

[0079] FIGS. 19A-19C show ABE8e CD33 editing in NHP HSPC subsets. NHP CD34+ cells (bottom panel, FIG. 19A) were treated with ABE8e mRNA or RNPs targeting CD33 and subsequently sorted for the different HSPC subpopulations: CD34+ (FIG. 19A, top panel), CD90+, CD90− and CD45RA+ (FIG. 19B). Validation of the purity of the sorting experiment is shown. CD33 editing efficiency in the different subpopulations from FIG. 19A-19B, measured by NGS, is shown in cells treated with ABE8e mRNA (FIG. 19C, top panel) or RNPs (FIG. 19C, bottom panel). SEQ ID NO: 13 is shown in both graphs of FIG. 19C.

[0080] FIGS. 20A, 20B illustrate engraftment of multiplex edited ABE8e HBG/CD33 FL CD34+ in immunodeficient mice. FIG. 20A is a pair of graphs showing longitudinal tracking of human cell engraftment based on human CD45+ flow cytometry staining from peripheral blood over 21 weeks (left) or from spleen and bone marrow of transplanted mice at the time of necropsy (right). FIG. 20B is a pair of graphs showing persistence of CD33 knockdown after engraftment. Longitudinal tracking of CD33 expression from peripheral blood over 21 weeks (left) or from spleen and bone marrow of transplanted mice at the time of necropsy (right); untreated cells are solid squares, and multiplex edited cells are solid circles. Edited cells show very little CD33 expression over time, compared to control.

[0081] FIG. 21 is a graph illustrating cytotoxicity of BEs vs CRISPR/Cas9 when delivered using a HDAd vector. Cytotoxicity of HDAds expressing BEs vs CRISPR/Cas9. Human CD34+ HSPCs were transduced with the CRISPR vector HDAd-HBG-CRISPR, the BE vector HDAd-ABE-sgHBG #2, or a control vector HDAd-GFP at a MOI 3000vp/cell. Twenty-four hours after transduction, the cells were used for in vivo engraftment studies. Cells were intravenously infused into irradiated NSG mice at 5×10⁵ cells/mouse (n=3 per treatment). Untransduced cells or HSPCs transduced with a GFP-expressing vector (HDAd-GFP) were used as controls. Engraftment reflected by % human CD45+ cells in PBMCs at the indicated weeks after infusion was measured by flow cytometry. Each dot represents one animal. *, p<0.05. ns, not significant. This graph shows that engraftment (a critical functional feature of HSC) of edited cells in sub-lethally irradiated NSG mice is not affected by transduction of human huCD45+ cells with a BE expressing adenoviral vector (HDAd-ABE-sgHBG #2), but is dramatically reduced after transduction of human CD34+ cells with a CRISPR/Cas9 expressing adenoviral vector (HDAd-HBG-CRISPR).

[0082] FIG. 22 is a general schematic of HDAd35 vector production; Features of representative Ad35 helper virus and vectors described herein. The five-point star indicates the following text: -combination (addition and reactivation) for SB100× and targeted; -multiple sgRNAs for CRISPR or BE; -miRNA (miR187/218) regulated expression of Cas9; and -auto-inactivation of Cas9.

[0083] FIG. 23. The left end of Ad5/35 helper virus genome (SEQ ID NO: 186). The sequences shaded in dark grey correspond to the native Ad5 sequence, i.e., the unshaded or light grey highlighted sequences were artificially introduced. The sequences highlighted in light grey are 2 copies of the (tandemly repeated) loxP sequences. In the presence of “cre recombinase” protein, the nucleotide sequence between the two loxP sequences are deleted (leaving behind one copy of loxP). Because the Ad5 sequence between the loxP sites is essential for packaging the adenoviral DNA into capsids (in the nucleus of the producer cell), this deletion results in the helper adenovirus genome DNA not to be packageable. Consequently, the efficiency of the deletion process has a direct influence of the level of packaged helper genomic DNA (the undesired helper virus “contamination”). In view of the above, in order to translate the same scheme to adenovirus serotypes other than Ad5, it is desirable to achieve the following: 1. Identify the sequences that are essential for packaging, so that they can be flanked by loxP sequence insertions and deleted in the presence of cre recombinase. Identification of these sequences is not straightforward if there is little similarity in sequences. 2. Determine where in the native DNA sequence the insertion of loxP sequence would have the least effect for the propagation and packaging of helper virus (in the absence of cre recombinase). 3. Determine the spacing between the loxP sequences to allow for efficient deletion of packaging sequences and keeping helper virus packaging to a minimum during the production of helper-dependent adenovirus (i.e., in a cre recombinase—expressing cell line such as the 116 cell line).

[0084] FIG. 24. Alignment of Ad5 and Ad35 packaging signals (SEQ ID NOs: 187 and 188). The alignment of the left end sequences of Ad5 with Ad35 help in identifying packaging signals. The motifs in the Ad5 sequence that are important for packaging (AI through AV) are in boxes (see FIG. 1B of Schmid et al., J Virol., 71(5):3375-4, 1997). The location of the loxP insertion sites are indicated by black arrows. It is seen that the insertions flank AI to AIV and disrupt AV. Please note that the additional packaging signal AVI and AVII, as indicated in Schmid et al., have been deleted in the Ad5 helper virus as part of the E1 deletion of this vector.

[0085] FIG. 25. Schematic of pAd35GLN-5E4. This is a first-generation (E1/E3-deleted) Ad35 vector derived from a vectorized Ad35 genome (Holden strain from the ATCC) using a recombineering technique (Zhang et al., Cell Rep. 19(8):1698-17-9, 2017). This vector plasmid was then used to insert loxP sites.

[0086] FIG. 26. Information on plasmid packaging signals. The packaging site (PS)1 LoxP insertion sites are after nucleotide 178 and 344. This should remove AI to AIV. The rest of the packaging signal including AVI and AVII (after 344) has been deleted (as part of the E1 deletion (345 to 3113)). The PS2 LoxP insertion sites are after nucleotide 178 and 481. Additionally, nucleotides 179 to 365 have been deleted, so AI through AV are not present. The remaining packaging motifs AVI and AVII are removable by cre recombinase during HDAd production. The E1 deletion is from 482 to 3113. The PS3 LoxP insertion sites are after nucleotide 154 and 481. Three engineered vectors could be rescued. The percentage of viral genomes with rearranged loxP sites was 50, 20, and 60% for PS1, PS2, and PS3, respectively. Rearrangements occur when the lox P sites critically affected viral replication and gene expression. Vectors with rearranged loxP sites can be packaged and will contaminate the HDAd prep. SEQ ID NOs: 180, 172, and 173 exemplify the vectors diagramed as PS1, PS2, and PS3, respectively.

[0087] FIG. 27. Next generation HDAd35 platform compared to current HDAd5/35 platform. Both vectors contain a CMV-GFP cassette. The Ad35 vector does not contain immunogenic Ad5 capsid protein. Shows comparable transduction efficiency of CD34+ cells in vitro. Bridging study shows comparable transduction efficiency of CD34+ cells in vitro. Human HSCs, peripheral CD34+ cells from G-CSF mobilized donors were transduced with HDAd35 (produced with Ad35 helper P-2) or a chimeric vector containing the Ad5 capsid with fiber from Ad35, at MOIs 500, 1000, 2000 vp/cell. The percentage of GFP-positive cells was measured 48 hours after adding the virus in three independent experiments. Notably, infection with HDAd35 triggered cytopathic effect at 48 hours due to helper virus contamination.

[0088] FIG. 28. The PS2 helper vector was remade to focus on monkey studies. The following are actions learned from: deletion of E1 region, a mutant packaging signal flanked by Loxp, mutant packaging sequence, deletion of E3 region (27435430540), replace with Ad5E4orf6, insertion of stutter DNA flanking copGFP cassette, and introduction of mutation in the knob to make Ad35K++.

[0089] FIG. 29. Mutated packaging signal sequence provided (SEQ ID NO: 181). Residues 1 through 137 are the Ad35 ITR (SEQ ID NO: 182). Text in bold are the SwaI sites, the Loxp site is italicized (SEQ ID NO: 184), and the mutated packaging signal is underlined (SEQ ID NO: 185).

[0090] FIGS. 30A, 30B. Schematic drawings of various helper vector and packaging signal variants. In embodiments, the E3 region (27388→30402) is deleted and the CMV-eGFP cassette is located within an E3 deletion, Ad35K++, and eGFP is used instead of copGFP. All four helper vectors containing the packaging signal variants shown in (FIG. 30A) could be rescued. loxP sites were rearranged as amplification could be more efficient. Additional packaging signal variants are exemplified in FIG. 30B.

[0091] FIG. 31 provide diagrams of additional helper-dependent adenoviral vectors (HDAds) expressing BE. The overall structure of HDAd-CBE/ABE vectors contains a 4.2 kb mgmt^{P140K}/GFP transposon flanked by two frt-IRs and an around 9 kb base editor cassette. The transposon allows for integrated expression when co-delivered with HDAd-SB expressing SB100× transposase and flippase (Flpe). The BE cassette was placed outside of the transposon for transient expression. The 1St version of HDAd-ABE vectors was not rescuable. The 2^{nd} version of HDAd-ABE vector design contains two codon-optimized TadAN repeats to reduce sequence repetitiveness (N denotes new; * denotes the catalytic repeat). A microRNA responsive element (miR) was embedded in the 3′ human p-globin UTR to minimize toxicity to producer cells by specifically downregulating ABE expression in 116 cells. bGHpA, bovine growth hormone polyadenylation sequence. T2A, a self-cleaving 2A peptide. PGK, human PGK promoter. U6, human U6 promoter. rAPOBEC1, cytidine deaminase enzyme. 32aa or 9aa, linker with 32 or 9 amino acids. SpCas9n, SpCas9 nickase. UGI, uracil glycosylase inhibitor. SV40pA, simian virus 40 polyadenylation signal. TadA, adenosine deaminase. ITR, inverted terminal repeat. ψ, packaging signal.

[0092] FIG. 32 Detection of intergenic deletion. The detection of intergenic 4.9 k deletion was described previously (Li et al., Blood, 131(26): 2915, 2018). Genomic DNA isolated from total bone marrow MNCs were used as template. A 9.9 kb genomic region spanning the two CRISPR cutting sites at HBG1 and HBG2 promoters was amplified by PCR. An extra 5.0 kb band in the product indicates the occurrence of the 4.9 k deletion. The percentage of deletion was calculated according to a standard curve formula which was generated by PCR using templates with defined ratios of the 4.9 kb deletion. Samples derived from mice in vivo transduced with a CRISPR vector targeting HBG1/2 promoter were used in comparison. Each lane represents one animal.

### DETAILED DESCRIPTION

[0093] The present disclosure provides, among other things, base editing for selective protection of therapeutic cells from an anti-CD33 agent. In certain embodiments, base editing reduces expression of CD33 by therapeutic cells as compared to a reference, e.g., such that contacting therapeutic cells with an anti-CD33 agent is less likely to eliminate the therapeutic cells. As disclosed herein, therapeutic cells can include any cells that express CD33 and/or are therapeutic at least in that they cause, elicit, or contribute to a desired pharmacological and/or physiological effect. In various embodiments, therapeutic cells are HSCs of a subject and the anti-CD33 agent is administered to the subject to treat cancer. In various embodiments, therapeutic cells are HSCs of a subject and the anti-CD33 agent is administered to positively select cells engineered for reduced CD33 expression as compared to a reference. In various embodiments, elimination of cells refers to causing the death, cessation of growth, cessation of proliferation, and/or cessation of one or more biological functions of a cell, e.g., as understood by those of skill in the art to result from contact of a cell with a particular agent such as an anti-CD33 agent.

### CD33

[0094] CD33 expression is characteristic of certain therapeutically relevant cell types, including without limitation HSCs. In various embodiments, CD33 expression is characteristic of one or more cells and/or cell types that would be beneficial to positively select and/or selectively protect. To provide a first non-limiting example, in some embodiments, cancer cells express CD33 such that the cancer can be treated by an anti-CD33 agent, but certain beneficial cells also express CD33 such that it would be advantageous to selectively protect the beneficial cells from the anti-CD33 agent. To provide a second non-limiting example, in some embodiments, CD33-expressing cells are genetically engineered to include a therapeutic modification and a modification that decreases CD33 expression, such that an anti-CD33 agent can positively select for engineered cells.

[0095] CD33-targeting agents can bind different forms and/or epitopes of CD33. A typical human CD33 protein can have an amino acid sequence according to SEQ ID NO: 14. Additional full length sequences of representative CD33 proteins are shown in SEQ ID NO: 169 (Macaca mulatta), SEQ ID NO: 170 (Macaca fascicularis), and SEQ ID NO: 171 (Mus musculus). An exemplary human genome sequence encoding CD33 can be a sequence according to SEQ ID NO: 15, from which various transcripts can be expressed including without limitation NM_001772 (full length), NM_001082618, and NM_001177608 (see, e.g., Laszlo, Oncotarget 7(28):43281-43294, 2016).

[0096] CD33 can include a number of domains including a signal peptide domain, a V-set Ig-like domain (mediates sialic acid binding), a C2-set Ig-like domain, a transmembrane domain, and a cytoplasmic tail. In various exemplary embodiments, a signal peptide domain corresponds to amino acids 1-16 of SEQ ID NO: 14, a V-set Ig-like domain (mediates sialic acid binding) corresponds to amino acids 17 or 19-135 of SEQ ID NO: 1, a C2-set Ig-like domain corresponds to amino acids 145-228 of SEQ ID NO: 14, a transmembrane domain correspond to amino acids 260-282 of SEQ ID NO: 14, and a cytoplasmic tail (includes conserved tyrosine-based inhibitory signaling motifs) corresponds to amino acids 283-364 of SEQ ID NO: 14. For example, full length CD33 (CD33FL) (SEQ ID NO: 14) is a transmembrane glycoprotein that is characterized by an amino-terminal, membrane-distant V-set immunoglobulin (Ig)-like domain and a membrane-proximal C2-set Ig-like domain in its extracellular portion. In addition to CD33FL, a splice variant that misses exon 2 (CD33ΔE2) (SEQ ID NO: 17) has also been identified. Various studies have identified an AML-expressed CD33 splice variant missing exon 2 (CD33ΔE2) and consequently lacking the immune-dominant membrane-distal V-set domain as well as CD33 splice variants lacking all or a portion of other domains such as the intracellular domain. Thus, CD33 can refer to, among other things, any native, mature CD33 which results from processing of a CD33 precursor protein in a cell (FIG. 1; SEQ ID NOs: 14 and 169-171).

[0097] CD33 is typically primarily displayed on maturing and mature cells of the myeloid lineage, including multipotent myeloid precursors. CD33 is a protein that is expressed on normal hematopoietic cells as they mature. Thus, in various embodiments, therapeutic cells that can be administered as a treatment for immune deficiencies or other blood-related disorders can be therapeutic cells that express or begin to express CD33. CD33 is not typically found on pluripotent hematopoietic stem cells or non-blood cells.

[0098] CD33 is widely expressed on neoplastic cells in patients with a variety of hematologic disorders, such as myelodysplastic syndrome (MDS) or acute myeloid leukemia (AML). Accordingly, CD33 represents a cellular marker for both administered therapeutic cells and unwanted non-treated, cancerous, and/or malignant cells within a patient. Consistent with its role as a myeloid differentiation antigen, CD33 is widely expressed on malignant cells in patients with myeloid neoplasms, particularly acute myeloid leukemia (AML), where it is displayed on at least a subset of the leukemia blasts in almost all cases and possibly leukemia stem cells in some. Because of this expression pattern, there has been great interest in developing therapeutic antibodies directed at CD33. While unconjugated monoclonal CD33 antibodies proved ineffective in patients with AML, several randomized trials with the CD33 antibody-drug conjugate (ADC) gemtuzumab ozogamicin (GO) (MYLOTARG®, Pfizer, New York, N.Y.) have demonstrated improved survival in some AML patients. This establishes the value of antibodies in this disease and validates CD33 as the first and (so far) only therapeutic target for AML immunotherapy. This benefit of GO in randomized trials led to regulatory re-approval by the U.S. Food & Drug Administration (FDA) in 2017 for the treatment of newly-diagnosed as well as relapsed or refractory CD33-expressing AML. In 2018, GO was also approved by the European Medicines Agency (EMA) in Europe for the treatment of patients 5 years in combination with intensive chemotherapy for the treatment of newly-diagnosed de novo AML.

[0099] At least in part because CD33 can be a target for agents to kill diseased and/or unwanted cells, there has been great interest in developing therapeutic antibodies directed at CD33. However, because CD33 is also expressed on normal immune cells and other non-malignant cells, treatments that target it have created what are referred to as significant “on-target, but off-leukemia” or “on-target, off-tumor” effects.” The expression of CD33 on maturing and mature cells of the myeloid lineage leads to significant on-target, off-leukemia effects of CD33-targeted immunotherapy. Such effects include suppression of the blood and immune system in the forms of severe thrombocytopenia, neutropenia, and monocytopenia in patients. For example, the CD33 ADC GO when given alone causes almost universal severe thrombocytopenia and neutropenia (thus, for example, with GO monotherapy given at standard dose, grade 3/4 toxicities include invariable myelosuppression), and when combined with conventional chemotherapy GO has resulted in prolongation of cytopenias and increased non-relapse related mortality, in part due to increased frequency of fatal infections, in some clinical trials. Some non-randomized studies similarly reported substantially increased hematologic toxicities with the use of GO together with conventional chemotherapeutics, indicating a narrow therapeutic window. Several CD33-targeting therapeutics, including newer-generation ADCs (SGN-CD33A, IMGN779), bispecific antibodies (AMG330, AMG673, AMV-564), and CAR-modified T-cells have entered clinical testing and are more potent than GO. Among these recently developed investigational agents, most advanced in development was SGN-CD33A, with clinical data from early-phase clinical trials indicating not only anti-leukemia efficacy but also the potential to cause prolonged cytopenias and life-threatening sequelae (e.g., bleeding, infection). The latter problem is perhaps best exemplified by the premature termination of the CASCADE trial (phase 3 trial testing SGN-CD33A in addition to DNA methyltransferase inhibitor) because of an increase in deaths including fatal infections. In fact, partly because of these results, SGN-CD33A is no longer currently pursued as a clinical therapeutic. For various other newer-generation anti-CD33 therapeutics, highly effective elimination of CD33-positive cells is expected to cause very prolonged cytopenias and increase risks of infection and bleeding with such potent CD33-targeted immunotherapies.

[0100] The experience with GO and SGN-CD33A suggests that clinically-relevant toxicity of CD33-targeted immunotherapy could be minimized in the presence of normal hematopoietic cells that do not display, or have reduced expression of the CD33 antigen.

[0101] To address the described “on-target, off-tumor” effects, strategies have been developed to protect beneficial therapeutic hematopoietic cells from anti-CD33 therapies while leaving residual diseased cells susceptible to anti-CD33 treatments. Certain of these strategies achieve this benefit by genetically modifying HSC to have reduced or eliminated expression of CD33, thus protecting them from anti-CD33 based therapies. In this manner, genetically modified therapeutic cells will not be harmed by concurrent or subsequent anti-CD33 therapies a patient may receive. However, in various embodiments, pre-existing CD33-expressing cells in the patient and/or administered cells that lack the genetic modification will not be protected, resulting in positive selection for the therapeutic cells over other cells.

[0102] One approach to reducing CD33 expression that has been explored includes utilizing CRISPR/Cas9 nuclease-based gene editing of CD34+ hematopoietic stem and progenitor cells (HSPCs) to reduce CD33 expression. This strategy successfully conferred protection from CD33-directed drugs. While promising, there were also drawbacks associated with this CRISPR/Cas9-based strategy. For example, the CRISPR/Cas9 nuclease also suffers from off-target activity due to cleavage of a nearby CD33 homolog pseudogene and from activation of endogenous TP53-mediated DNA damage responses.

Base Editing Systems for Inactivation of CD33 in Therapeutic and/or CD33-Expressing Cells

[0103] The present disclosure includes methods and compositions that relate to base editing of nucleic acid sequences to reduce CD33 expression in therapeutic cells as compared to a reference, e.g., by base editing of nucleic acid sequences that encode and/or contribute to expression of CD33. A base editing system can include a base editing enzyme and/or at least one gRNA as components thereof. As disclosed herein, an anti-CD33 agent may be administered to a subject or system, e.g., to selectively target and/or eliminate cells such as cancer cells that express CD33 or to positively select for engineered cells. In embodiments in which an anti-CD33 agent selectively targets and/or eliminates cells such as cancer cells that express CD33, the present disclosure contemplates that it may be desirable to protect during anti-CD33 therapy certain cells of therapeutic value that typically express CD33, e.g., HSCs. Accordingly, administration to the subject or system of agent(s) that inactivate CD33 in cells of therapeutic value (e.g., HSCs), e.g., without inactivating CD33 in target cells such as cancer cells, can improve therapy and/or provide a therapeutic benefit. In embodiments in which cells that typically express CD33 are engineered by an agent that introduces a therapeutic genetic modification, the agent can be engineered such that it can also inactivate CD33 expression, such that CD33 inactivation becomes a biomarker of the therapeutic genetic modification and allows positive selection of therapeutically genetically modified cells upon administration to the subject or system of an anti-CD33 agent. As provided herein, base editing systems and/or techniques provide at least certain compositions and methods for CD33 inactivation.

[0104] As disclosed herein, CD33 inactivation includes modification of one or more genomic sequences that encode CD33, contribute to expression of CD33, or are operably linked to sequences that encode or contribute to expression of CD33, where the modification of the one or more genomic sequences reduces expression of CD33 (and/or expression of a form of CD33 capable of being bound by anti-CD33 agents, e.g., one or more particular anti-CD33 agents, e.g., one or more particular anti-CD33 agents of the present disclosure) as compared to a reference. CD33 inactivation as disclosed herein further includes reduction of expression of CD33 (and/or expression of a form of CD33 capable of being bound by anti-CD33 agents, e.g., one or more particular anti-CD33 agents, e.g., one or more particular anti-CD33 agents of the present disclosure) as compared to a reference. Exemplary genomic CD33 sequences that can be modified to inactivate CD33 can include CD33 exons, CD33 introns, CD33 promoters, CD33 untranslated regions (UTRs), and the like. Reduced expression of CD33 can refer to any decrease in rate of production or amount of CD33 transcripts and/or CD33 polypeptides by a cell or population of cells, e.g. a population of cells of a particular type. Reduced expression can be determined by comparison to a reference, where the reference can be any of, without limitation, a sample or measurement representative of the same cell or population of cells prior to CD33 inactivation, a sample or measurement representative of a comparable cell or population of cells not subject to CD33 inactivation, or a standard, reference, or threshold value. In various embodiments, those of skill in the art will appreciate that a reference sample or measurement may be from a cell or population of cells under the same, similar, or comparable conditions. In some embodiments, a reference is a sample or measurement representative of a same, similar, or comparable cell type from the same individual prior to CD33 inactivation or from a different individual or group of individuals absent or prior to CD33 inactivation, In some embodiments a reference is a comparable cell or population of cells maintained in vitro, such as a laboratory strain. In some embodiments a reference is a value designated, known, and/or accepted as a normative or threshold value.

[0105] Base editing refers to the selective modification of a nucleic acid sequence by converting a base or base pair within genomic DNA or cellular RNA to a different base or base pair (Rees & Liu, Nature Reviews Genetics, 19:770-788, 2018). There are two general classes of DNA base editors: (i) cytosine base editors (CBEs) that convert guanine-cytosine base pairs into thymine-adenine base pairs, and (ii) adenine base editors (ABEs) that convert adenine-thymine base pairs to guanine cytosine base pairs. Broadly, a base editing system can include a base editing enzyme and at least one gRNA. DNA base editors can include a catalytically disabled nuclease fused to a nucleobase deaminase enzyme and, in some cases, a DNA glycosylase inhibitor. RNA base editors achieve analogous changes using components that base modify RNA. Components of most base-editing systems include (1) a targeted DNA binding polypeptide, (2) a nucleobase deaminase enzyme polypeptide and (3) a DNA glycosylase inhibitor polypeptide. In particular embodiments, a deaminase domain (cytidine and/or adenine) is fused to the N-terminus of the catalytically disabled nuclease. As indicated, most base-editing enzymes and/or systems include a DNA glycosylase inhibitor that serves to override natural DNA repair mechanisms that might otherwise repair the intended base editing. Presence of uracil glycosylase inhibitor suppresses natural DNA repair mechanisms following the base edit. For additional examples regarding such base editing systems, see WO 2018/165629A1. In particular embodiments, the DNA glycosylase inhibitor includes a uracil glycosylase inhibitor, such as the uracil DNA glycosylase inhibitor protein (UGI) described in Wang et al. (Gene 99, 31-37, 1991).

[0106] In particular embodiments, the targeted DNA binding protein can be a catalytically disabled nuclease. In particular embodiments, a targeted DNA binding protein with nickase activity is selected. Examples of such DNA binding proteins include nuclease-inactive Cas9 proteins. In particular embodiments, a Cas9 domain with high fidelity is selected wherein the Cas9 domain displays decreased electrostatic interactions between the Cas9 domain and a sugar-phosphate backbone of a DNA, as compared to a wild-type Cas9 domain. In some embodiments, a Cas9 domain (e.g., a wild type Cas9 domain) includes one or more mutations that decrease the association between the Cas9 domain and a sugar-phosphate backbone of a DNA. Cas9 domains with high fidelity are known to those skilled in the art. For example, Cas9 domains with high fidelity have been described in Kleinstiver et al. (Nature 529, 490-495, 2016) and Slaymaker et al. (Science 351, 84-88, 2015).

[0107] Particular embodiments utilize nuclease-inactive Cas9 (dCas9), a mutant of Cas9 containing D10A and H840A mutations allowing nickase activity, as the catalytically disabled nuclease. Additional embodiments utilize a Cas9 with the D10A mutation. However, any nuclease of the CRISPR system (many of which are described above) can be disabled and used within a base editing system. In particular embodiments, a Cas9 domain with high fidelity is selected wherein the Cas9 domain displays decreased electrostatic interactions between the Cas9 domain and a sugar-phosphate backbone of a DNA, as compared to a wild-type Cas9 domain. In some embodiments, a Cas9 domain (e.g., a wild type Cas9 domain) includes one or more mutations that decrease the association between the Cas9 domain and a sugar-phosphate backbone of a DNA. Cas9 domains with high fidelity are known to those skilled in the art. For example, Cas9 domains with high fidelity have been described in Kleinstiver et al. (Nature 529, 490-495, 2016) and Slaymaker et al. (Science 351, 84-88, 2015).

[0108] Beyond Cas9, any nuclease of the CRISPR system can be disabled and used within a base editing system. Additional exemplary Cas nucleases include CasI, CasIB, Cas2, Cas3, Cas4, Cas5, Cas6, Cas7, Cas8, Cas9 (also known as CsnI and CsxI2), CasIO, CpfI, C2c3, C2c2 and C2clCsyI, Csy2, Csy3, Cse1, Cse2, CscI, Csc2, Csa5, Csn2, Csm2, Csm3, Csm4, Csm5, Csm6, CmrI, Cmr3, Cmr4, Cmr5, Cmr6, CpfI, Csbl, Csb2, Csb3, CsxI7, CsxI4, CsxIO, CsxI6, CsaX, Csx3, CsxI, CsxI5, Csf1, Csf2, Csf3, and Csf4.

[0109] Nucleases from other gene-editing systems may also be used. For example, base-editing systems can utilize zinc finger nucleases (ZFNs) (Urnov et al., Nat Rev Genet. 2010; 11(9):636-46) and transcription activator like effector nucleases (TALENs) (Joung et al., Nat Rev Mol Cell Biol. 14(1):49-55, 2013). For additional information regarding DNA-binding nucleases, see US2018/0312825A1.

[0110] In particular embodiments, components from the CRISPR system are combined with other enzymes or biologically active fragments thereof to directly install, cause, or generate mutations such as point mutations in nucleic acids, e.g., into DNA or RNA, e.g., without making, causing, or generating one or more double-stranded breaks in the mutated nucleic acid. Certain such combinations of components are known as base editors.

[0111] Components of base editors can be fused directly (e.g., by direct covalent bond) or via linkers. For example, the catalytically disabled nuclease can be fused via a linker to the deaminase enzyme and/or a glycosylase inhibitor. Multiple glycosylase inhibitors can also be fused via linkers. As will be understood by one of ordinary skill in the art, linkers can be used to link any peptides or portions thereof.

[0112] Exemplary linkers include polymeric linkers (e.g., polyethylene, polyethylene glycol, polyamide, polyester); amino acid linkers; carbon-nitrogen bond amide linkers; cyclic or acyclic, substituted or unsubstituted, branched or unbranched aliphatic or heteroaliphatic linkers; monomeric, dimeric, or polymeric aminoalkanoic acid linkers; aminoalkanoic acid (e.g., glycine, ethanoic acid, alanine, beta-alanine, 3-aminopropanoic acid, 4-aminobutanoic acid, 5-pentanoic acid) linkers; monomeric, dimeric, or polymeric aminohexanoic acid (Ahx) linkers; carbocyclic moiety (e.g., cyclopentane, cyclohexane) linkers; aryl or heteroaryl moiety linkers; and phenyl ring linkers.

[0113] Linkers can also include functionalized moieties to facilitate attachment of a nucleophile (e.g., thiol, amino) from a peptide to the linker. Any electrophile may be used as part of the linker. Exemplary electrophiles include activated esters, activated amides, Michael acceptors, alkyl halides, aryl halides, acyl halides, and isothiocyanates.

[0114] In particular embodiments, linkers range from 4-100 amino acids in length. In particular embodiments, linkers are 4 amino acids, 9 amino acids, 14 amino acids, 16 amino acids, 32 amino acids, or 100 amino acids.

[0115] Base editors can directly convert one base or base pair into another, enabling the efficient installation of point mutations in non-dividing cells without generating excess undesired editing by-products, such as insertions and deletions (indels). For example, base editors can generate less than 10%, 9%, 8%, 7%, 6%, 5.5%, 5%, 4.5%, 4%, 3.5%, 3%, 2.5%, 2%, 1.5%, 1%, 0.5%, or 0.1% indels.

[0116] DNA base editors can insert such point mutations in non-dividing cells without generating double-strand breaks. Due to the lack of double-strand breaks, base editors do not result in excess undesired editing by-products, such as insertions and deletions (indels). For example, base editors can generate less than 10%, 9%, 8%, 7%, 6%, 5.5%, 5%, 4.5%, 4%, 3.5%, 3%, 2.5%, 2%, 1.5%, 1%, 0.5%, or 0.1% indels as compared to technologies that do rely on double-strand breaks.

[0117] In particular embodiments, the nucleobase deaminase enzyme is a cytidine deaminase domain or an adenine deaminase domain.

[0118] Certain particular embodiments utilize a cytidine deaminase domain as the nucleobase deaminase enzyme. Further, particular embodiments utilize a uracil glycosylase inhibitor (UGI) as a glycosylase inhibitor. For example, in particular embodiments, dCas9 or a Cas9 nickase can be fused to a cytidine deaminase domain. The dCas9 or a Cas9 nickase fused to the cytidine deaminase domain can be fused to one or more UGI domains. Base editors with more than one UGI domain can generate less indels and more efficiently deaminates target nucleic acids.

[0119] Particular embodiments can include a catalytically disabled CRISPR nuclease, such as a nuclease-inactive CRISPR-associated protein 9 (Cas9 (dCas9)) fused to a cytidine deaminase domain and a uracil glycosylase inhibitor. Particular embodiments can utilize a dCas9 or a Cas9 nickase fused to the cytidine deaminase domain can be fused to one or more glycosylase inhibitors, such as a UGI protein domain. Base editors with more than one UGI domain can generate less indels and more efficiently deaminate target nucleic acids. In certain embodiments, the base-editing system binds a specific nucleic acid sequence via the CRISPR nuclease domain, deaminates a cytosine within the nucleic acid sequence to a uridine. In particular embodiments, a deaminase domain (cytidine and/or adenine) is fused to the N-terminus of the catalytically disabled nuclease. A cytidine deaminase domain fused to the N-terminus of Cas9 can have improved base-editing efficiency when compared to other configurations. In these embodiments, a glycosylase inhibitor (e.g., UGI domain) can be fused to the C-terminus of the catalytically disabled nuclease. When multiple glycosylase inhibitors are used, each can be fused to the C-terminus of the catalytically disabled nuclease.

[0120] In particular embodiments, CBE utilizing a cytidine deaminase domain convert guanine-cytosine base pairs into thymine-adenine base pairs by deaminating the exocylic amine of the cytosine to generate uracil. Examples of cytosine deaminase enzymes include APOBEC1, APOBEC3A, APOBEC3G, CDA1, and AID. APOBEC1 particularly accepts single stranded (ss)DNA as a substrate but is incapable of acting on double stranded (ds)DNA. For CBEs, CRISPR-based editors can be produced by linking a cytosine deaminase with a Cas nickase, e.g., Cas9 nickase (nCas9). To provide one example, nCas9 can create a nick in target DNA by cutting a single strand, reducing the likelihood of detrimental indel formation as compared to methods that require a double-stranded break. After binding with DNA, the CBE deaminates a target cytosine (C) into a uracil (U) base. Later the resultant U-G pair is either repaired by cellular mismatch repair machinery making an original C-G pair converted to T-A or reverted to the original C-G by base excision repair mediated by uracil glycosylase. In various embodiments, expression of uracil glycosylase inhibitor (UGI), e.g., a UGI present in a payload, reduces the occurrence of the second outcome and increases the generation of T-A base pair formation.

[0121] Numerous base-editing (BE) systems formed by linking targeted DNA binding proteins with cytidine deaminase enzymes and DNA glycosylase inhibitors (e.g., UGI) have been described. These complexes include for example, BE1 ([APOBEC1-16 amino acid (aa) linker-Sp dCas9 (D10A, H840A)] Komer et al., Nature, 533, 420-424, (2016)), BE2 ([APOBEC1-16aa linker-Sp dCas9 (D10A, H840A)-4aa linker-UGI] Komer et al., 2016 supra), BE3 ([APOBEC1-16aa linker-Sp nCas9 (D10A)-4aa linker-UGI] Komer et al., supra), HF-BE3 ([APOBEC1-16aa linker-HF nCas9 (D10A)-4aa linker-UGI] Rees et al., Nat. Commun. 8, 15790, (2017)), BE4, BE4max ([APOBEC1-32aa linker-Sp nCas9 (D10A)-9aa linker-UGI-9aa linker-UGI] Koblan et al., Nat. Biotechnol 10.1038/nbt.4172 (2018); Komer et al., Sci. Adv., 3, eaao4774, (2017)), BE4-GAM ([Gam-16aa linker-APOBEC1-32aa linker-Sp nCas9 (D10A)-9aa linker-UGI-9aa linker-UGI] Komer et al., 2017 supra), YE1-BE3 ([APOBEC1 (W90Y, R126E)-16aa linker-Sp nCas9 (D10A)-4aa linker-UGI] Kim et al., Nat. Biotechnol. 35, 475-480 (2017)), EE-BE3 ([APOBEC1 (R126E, R132E)-16aa linker-Sp nCas9 (D10A)-4aa linker-UGI] Kim et al., 2017 supra), YE2-BE3 ([APOBEC1 (W90Y, R132E)-16aa linker-Sp nCas9 (D10A)-4aa linker-UGI]Kim et al., 2017 supra), YEE-BE3 ([APOBEC1 (W90Y, R126E, R132E)-16aa linker-Sp nCas9 (D10A)-4aa linker-UGI] Kim et al., 2017 supra), VQR-BE3 ([APOBEC1-16aa linker-Sp VQR nCas9 (D10A)-4aa linker-UGI] Kim et al., 2017 supra), VRER-BE3 ([APOBEC1-16aa linker-Sp VRER nCas9 (D10A)-4aa linker-UGI] Kim et al., Nat. Biotechnol. 35, 475-480, (2017)), Sa-BE3 ([APOBEC1-16aa linker-Sa nCas9 (D10A)-4aa linker-UGI] Kim et al., 2017 supra), SA-BE4 ([APOBEC1-32aa linker-Sa nCas9 (D10A)-9aa linker-UGI-9aa linker-UGI] Komer et al., 2017 supra), SaBE4-Gam ([Gam-16aa linker-APOBEC1-32aa linker-Sa nCas9 (D10A)-9aa linker-UGI-9aa linker-UGI] Komer et al., 2017 supra), SaKKH-BE3 ([APOBEC1-16aa linker-Sa KKH nCas9 (D10A)-4aa linker-UGI] Kim et al., 2017 supra), Cas12a-BE ([APOBEC1-16aa linker-dCas12a-14aa linker-UGI], Li et al., Nat. Biotechnol. 36, 324-327 (2018)), Target-AID ([Sp nCas9 (D10A)-100aa linker-CDA1-9aa linker-UGI] Nishida et al., Science, 353, 10.1126/science.aaf8729 (2016)), Target-AID-NG ([Sp nCas9 (D10A)-NG-100aa linker-CDA1-9aa linker-UGI] Nishimasu et al., Science 2018 Sep. 21; 361(6408): 1259-1262), xBE3 ([APOBEC1-16aa linker-xCas9(D10A)-4aa linker-UGI] Hu et al., Nature, 556, 57-63 (2018)), eA3A-BE3 ([APOBEC3A (N37G)-16aa linker-Sp nCas9(D10A)-4aa linker-UGI] Gerkhe et al., Nat. Biotechnol., 10.1038/nbt.4199 (2018)), A3A-BE3 ([hAPOBEC3A-16aa linker-Sp nCas9(D10A)-4aa linker-UGI] Wang et al., Nat. Biotechnol. 10.1038/nbt.4198 (2018)), and BE-PLUS ([10× GCN4-Sp nCas9(D10A)/ScFv-rAPOBEC1-UGI] Jiang et al., Cell. Res, 10.1038/s41422-018-0052-4 (2018)). For additional examples of base editing agents and/or systems, including adenine deaminase base editors such as TadA*-dCas9, TadA-TadA*-Cas9, ABE7.9, ABE 6,3, and ABE7.10, see Rees & Liu Nat. Rev Genet. 2018 December; 19(12): 770-788.

[0122] Particular embodiments of the systems and methods disclosed herein utilize pCMV_BE4max (Addgene plasmid #112093; RRID:Addgene112093 and as described in Koblan et al., Nat. Biotechnol. 2018 May 29. pii: nbt.4172. doi: 10.1038/nbt.4172. 10.1038/nbt.4172). BE4max and AncBE4max are examples of cytosine base editors.

[0123] Particular embodiments of the systems and methods disclosed herein utilize base editors that are engineered to edit more than one type of nucleotide, such as both adenine and cytosine. Examples of such dual base editors are described in: Zhao et al. (“Glycosylase base editors enable C-to-A and C-to-G base changes.” Nat Biotechnol. 2020 doi: 10.1038/s41587-020-0592-2. PMID: 32690970), Kim et al. (“Adenine base editors catalyze cytosine conversions in human cells.” Nat Biotechnol. 37(10):1145-1148, 2019), Zhang et al. (“Dual base editor catalyzes both cytosine and adenine base conversions in human cells.” Nat Biotechnol. 38(7):856-860, 2020), and Grunewald et al. (“A dual-deaminase CRISPR base editor enables concurrent adenine and cytosine editing.” Nat Biotechnol. 38(7):861-864, 2020).

[0124] Certain particular embodiments utilize an adenine deaminase domain as the nucleobase deaminase enzyme. For ABEs, exemplary adenosine deaminases that can act on DNA for adenine base editing include a mutant TadA adenosine deaminases (TadA*) that accepts DNA as its substrate. E. coli TadA typically acts as a homodimer to deaminate adenosine in transfer RNA (tRNA). TadA* deaminase catalyzes the conversion of a target ‘A’ to ‘I’ (inosine), which is treated as ‘G’ by cellular polymerases. Subsequently, an original genomic A-T base pair can be converted to a G-C pair. As the cellular inosine excision repair is not as active as uracil excision, ABE does not require any additional inhibitor protein like UGI in CBE. In some embodiments, a typical ABE can include three components including a wild-type E. coli tRNA-specific adenosine deaminase (TadA) monomer, which can play a structural role during base editing, a TadA* mutant TadA monomer that catalyzes deoxyadenosine deamination, and a Cas nickase such as Cas9(D10A). In certain embodiments, there is a linker positioned between TadA and TadA*, and in certain embodiments there is a linker positioned between TadA* and the Cas nickase. In various embodiments, one or both linkers includes at least 6 amino acids, e.g., at least 5, 6, 7, 8, 9, 10, 15, 20, 25, 30, 35, 40, 45, or 50 amino acids (e.g., having a lower bound of 5, 6, 7, 8, 9, 10, or 15, amino acids and an upper bound of 20, 25, 30, 35, 40, 45, or 50 amino acids). In various embodiments, one or both linkers include 32 amino acids. In some embodiments, one or both linkers have a sequence according to (SGGS)2-XTEN-(SGGS)2 (SEQ ID NO: 18), or a sequence otherwise known to those of skill in the art. In this context, XTEN is a peptide linker with the sequence SGSETPGTSESATPES (SEQ ID NO. 183). See WO 2019/079374.

[0125] For additional information regarding base editors, see US 2018/0312825A1, WO 2018/165629A, Urnov et al., Nat Rev Genet. 11 (9):636-46, 2010; Joung et al., Nat Rev Mol Cell Biol. 14(1):49-55, 2013; Charpentier et al., Nature.; 495(7439):50-1, 2013; Seo & Kim, Nature Medicine, 24. 1493-1495. 2018, and Rees & Liu, Nature Reviews Genetics, 19, 770-78, 2018, each of which is incorporated herein by reference in its entirety and with specific respect to base editors. Certain base editor constructs that can be used in various embodiments of the present disclosure are described in Zafra et al., Nat Biotech, 36(9):888-893, 2018, and Koblan et al., Nat Biotech 36(9):843-846, 2018, each of which is incorporated herein by reference in its entirety and with specific respect to base editor constructs.

[0126] The present disclosure includes that ABEs and CBEs may be used in methods and compositions of the present disclosure to reduce CD33 expression in therapeutic cells as compared to a reference, e.g., by base editing of nucleic acid sequences that encode and/or contribute to expression of CD33. As will be clear from the present disclosure ABEs and CBEs are used in conjunction to gRNAs that mediate base editing activity. As those of skill in the art will appreciate from the present disclosure, any of a wide variety of therapeutic cell sequences can be targeted for modification by an ABE and/or CBE of the present disclosure to reduce expression of CD33.

[0127] In various embodiments, a base editor of the present disclosure introduces (e.g., in the presence of a gRNA that directs the base editing activity of the base editor) a nucleic acid sequence variation in a CD33-encoding sequence of a therapeutic cell that causes reduced expression of CD33 as compared to a reference. In various embodiments, a base editor of the present disclosure introduces a nucleic acid sequence variation in a CD33-encoding sequence of a therapeutic cell that causes reduced expression of full length CD33 as compared to a reference, e.g., reduced expression of CD33 polypeptides bound or capable of being bound by an anti-CD33 agent (e.g., one or more anti-CD33 agents of the present disclosure). In various embodiments, a base editor of the present disclosure introduces a nucleic acid sequence variation in a CD33-encoding sequence of a therapeutic cell that causes expression of a truncated CD33 polypeptide. In various embodiments, a base editor of the present disclosure introduces a nucleic acid sequence variation in a CD33-encoding sequence of a therapeutic cell that modifies or deletes the signal peptide domain of CD33. In various embodiments, a base editor of the present disclosure introduces a nucleic acid sequence variation in a CD33-encoding sequence of a therapeutic cell that modifies or deletes the V-set Ig-like domain of CD33. In various embodiments, a base editor of the present disclosure introduces a nucleic acid sequence variation in a CD33-encoding sequence of a therapeutic cell that modifies or deletes the C2-set Ig-like domain of CD33. In various embodiments, a base editor of the present disclosure introduces a nucleic acid sequence variation in a CD33-encoding sequence of a therapeutic cell that modifies or deletes the transmembrane domain of CD33. In various embodiments, a base editor of the present disclosure introduces a nucleic acid sequence variation in a CD33-encoding sequence of a therapeutic cell that modifies or deletes the cytoplasmic tail domain of CD33.

[0128] In various embodiments, a base editing system inactivates a splicing donor site of an endogenous CD33 gene, e.g., an intron 1 splicing donor site. In various embodiments, a base editing system introduces a stop codon within a CD33 coding sequence, e.g., a stop codon in a nucleic acid sequence encoding exon 2 of CD33. Particular examples of base editing systems (including gRNAs) that inactivate an intron 1 splicing donor site of CD33 are shown in FIG. 3B. Particular examples of gRNAs that introduce a stop codon into exon 2 of CD33 are shown in FIG. 3B.

[0129] Table 1 provides exemplary gRNA sequences useful in CD33 inactivation. These gRNAs are used to target two locations in the exon 2 splice acceptor site (SEQ ID NOs: 19 and 20), and two locations in the exon 3 splice acceptor site (SEQ ID NOs: 21 and 22). The positions for edits are shown bold.

TABLE 1
Representative gRNAs for CD33 knockdown

| | | | SEQ ID |
|---|---|---|---|
| Name | Sequence^ | Type | NO: |
| CD33 E1 splice donor site (see | CCCCUGCUGUGGGCAGGUGAGUG | CBE | 194 |
| Example 1) | | | |
| CD33_stop_E2 (see Example 1) | CCCCAGUUCAUGGUUACUGGUUC | CBE | 195 |
| CD33E2 splice (see Example 2) | CCCCACAGGGGCCCUGGCUA | ABE | 19 |
| CD33 exon 2 splice acceptor site 2 | CCCACAGGGGCCCUGGCUAU | ARE | 20 |
| (alternative) | | | |
| CD33 exon 3 splice acceptor site 5a | CCUCACUAGACUUGACCCAC | ARE | 21 |
| (human) | | | |
| CD33 exon 3 splice acceptor site 5b | UCUCACUAGACUUGACCCAC | ARE | 22 |
| (rhesus) | | | |

[0130] The present disclosure further includes kits that include a base editing enzyme of a base editing system (and/or nucleic acids encoding the same) and a guide RNA (gRNA) of a base editing system (and/or nucleic acids encoding the same), where the base editing system inactivates expression of CD33. The kit can further include an anti-CD33 agent and/or instructions for inactivation of CD33 in one or more cells. In various embodiments, the kit can include instructions for administration or other delivery of a base editing system to a cell, system, or subject, e.g., by administration of a viral vector encoding the base editing system to a cell, system, or subject. In various embodiments, the kit can include instructions for administration or other delivery of an anti-CD33 agent to a cell, system, or subject.

[0131] Variants of the nucleic acid and amino acid sequences disclosed and referenced herein are also included.

[0132] As indicated elsewhere, variants of gene sequences can include codon optimized variants, sequence polymorphisms, splice variants, and/or mutations that do not affect the function of an encoded product to a statistically significant degree.

[0133] Variants of the protein, nucleic acid, and gene sequences disclosed herein also include sequences with at least 70% sequence identity, 80% sequence identity, 85% sequence, 90% sequence identity, 95% sequence identity, 96% sequence identity, 97% sequence identity, 98% sequence identity, or 99% sequence identity to the protein, nucleic acid, or gene sequences disclosed herein.

[0134] Variants also include nucleic acid molecules that hybridizes under stringent hybridization conditions to a sequence disclosed herein and provide the same function as the reference sequence. Exemplary stringent hybridization conditions include an overnight incubation at 42° C. in a solution including 50% formamide, SXSSC (750 mM NaCl, 75 mM trisodium citrate), 50 mM sodium phosphate (pH 7.6), 5×Denhardt's solution, 10% dextran sulfate, and 20 μg/ml denatured, sheared salmon sperm DNA, followed by washing the filters in 0.1×SSC at 50° C. Changes in the stringency of hybridization and signal detection are primarily accomplished through the manipulation of formamide concentration (lower percentages of formamide result in lowered stringency); salt conditions, or temperature. For example, moderately high stringency conditions include an overnight incubation at 37° C. in a solution including 6×SSPE (20×SSPE=3 M NaCl; 0.2 M NaH₂PO₄; 0.02 M EDTA, pH 7.4), 0.5% SDS, 30% formamide, 100 μg/ml salmon sperm blocking DNA; followed by washes at 50° C. with 1×SSPE, 0.1% SDS. In addition, to achieve even lower stringency, washes performed following stringent hybridization can be done at higher salt concentrations (e.g. 5×SSC). Variations in the above conditions may be accomplished through the inclusion and/or substitution of alternate blocking reagents used to suppress background in hybridization experiments. Typical blocking reagents include Denhardt's reagent, BLOTTO, heparin, denatured salmon sperm DNA, and commercially available proprietary formulations. The inclusion of specific blocking reagents may require modification of the hybridization conditions described above, due to problems with compatibility.

[0135] Guidance in determining which amino acid residues can be substituted, inserted, or deleted without abolishing biological activity can be found using computer programs well known in the art, such as DNASTAR™ (Madison, Wis.) software. Preferably, amino acid changes in the protein variants disclosed herein are conservative amino acid changes, i.e., substitutions of similarly charged or uncharged amino acids. A conservative amino acid change involves substitution of one of a family of amino acids which are related in their side chains.

[0136] In a peptide or protein, suitable conservative substitutions of amino acids are known to those of skill in this art and generally can be made without altering a biological activity of a resulting molecule. Those of skill in this art recognize that, in general, single amino acid substitutions in non-essential regions of a polypeptide do not substantially alter biological activity (see, e.g., Watson et al. Molecular Biology of the Gene, 4th Edition, 1987, The Benjamin/Cummings Pub. Co., p. 224). Naturally occurring amino acids are generally divided into conservative substitution families as follows: Group 1: Alanine (Ala), Glycine (Gly), Serine (Ser), and Threonine (Thr); Group 2: (acidic): Aspartic acid (Asp), and Glutamic acid (Glu); Group 3: (acidic; also classified as polar, negatively charged residues and their amides): Asparagine (Asn), Glutamine (Gin), Asp, and Glu; Group 4: Gln and Asn; Group 5: (basic; also classified as polar, positively charged residues): Arginine (Arg), Lysine (Lys), and Histidine (His); Group 6 (large aliphatic, nonpolar residues): Isoleucine (Ile), Leucine (Leu), Methionine (Met), Valine (Val) and Cysteine (Cys); Group 7 (uncharged polar): Tyrosine (Tyr), Gly, Asn, Gin, Cys, Ser, and Thr; Group 8 (large aromatic residues): Phenylalanine (Phe), Tryptophan (Trp), and Tyr; Group 9 (non-polar): Proline (Pro), Ala, Val, Leu, Ile, Phe, Met, and Trp; Group 11 (aliphatic): Gly, Ala, Val, Leu, and Ile; Group 10 (small aliphatic, nonpolar or slightly polar residues): Ala, Ser, Thr, Pro, and Gly; and Group 12 (sulfur-containing): Met and Cys. Additional information can be found in Creighton (1984) Proteins, W.H. Freeman and Company.

[0137] In making such changes, the hydropathic index of amino acids may be considered. The importance of the hydropathic amino acid index in conferring interactive biologic function on a protein is generally understood in the art (Kyte and Doolittle, 1982, J. Mol. Biol. 157(1), 105-32). Each amino acid has been assigned a hydropathic index on the basis of its hydrophobicity and charge characteristics (Kyte and Doolittle, 1982). These values are: Ile (+4.5); Val (+4.2); Leu (+3.8); Phe (+2.8); Cys (+2.5); Met (+1.9); Ala (+1.8); Gly (−0.4); Thr (−0.7); Ser (−0.8); Trp (−0.9); Tyr (−1.3); Pro (−1.6); His (−3.2); Glutamate (−3.5); Gln (−3.5); aspartate (−3.5); Asn (−3.5); Lys (−3.9); and Arg (−4.5).

[0138] It is known in the art that certain amino acids may be substituted by other amino acids having a similar hydropathic index or score and still result in a protein with similar biological activity, i.e., still obtain a biological functionally equivalent protein. In making such changes, the substitution of amino acids whose hydropathic indices are within ±2 is preferred, those within ±1 are particularly preferred, and those within ±0.5 are even more particularly preferred. It is also understood in the art that the substitution of like amino acids can be made effectively on the basis of hydrophilicity.

[0139] As detailed in U.S. Pat. No. 4,554,101, the following hydrophilicity values have been assigned to amino acid residues: Arg (+3.0); Lys (+3.0); aspartate (+3.0±1); glutamate (+3.0±1); Ser (+0.3); Asn (+0.2); Gln (+0.2); Gly (0); Thr (−0.4); Pro (−0.5±1); Ala (−0.5); His (−0.5); Cys (−1.0); Met (−1.3); Val (−1.5); Leu (−1.8); Ile (−1.8); Tyr (−2.3); Phe (−2.5); Trp (−3.4). It is understood that an amino acid can be substituted for another having a similar hydrophilicity value and still obtain a biologically equivalent, and in particular, an immunologically equivalent protein. In such changes, the substitution of amino acids whose hydrophilicity values are within ±2 is preferred, those within ±1 are particularly preferred, and those within ±0.5 are even more particularly preferred.

[0140] As outlined above, amino acid substitutions may be based on the relative similarity of the amino acid side-chain substituents, for example, their hydrophobicity, hydrophilicity, charge, size, and the like.

Therapeutic and/or CD33-Expressing Cells

[0141] In various embodiments, CD33 inactivation provides a means to selectively protect therapeutic cells that typically express CD33, such as HSC and HSPC Populations, e.g., from targeting and/or elimination upon administration to a subject or system of an anti-CD33 agent. HSCs are stem cells that can give rise to all blood cell types such as the white blood cells of the immune system (e.g., virus-fighting T cells and antibody-producing B cells), platelets, and red blood cells.

[0142] In particular embodiments, HSC can be identified and/or sorted by the following marker profiles: CD34+; Lin-CD34+CD38-CD45RA-CD90+CD49f+ (HSC1); and CD34+CD38-CD45RA-CD90-CD49f+ (HSC2). Human HSC1 can be identified by the following profiles: CD34+/CD38-/CD45RA-/CD90+ or CD34+/CD45RA-/CD90+ and mouse LT-HSC can be identified by Lin-Sca1+ckit+CD150+CD48-Flt3-CD34- (where Lin represents the absence of expression of any marker of mature cells including CD3, CD4, CD8, CD11 b, CD11 c, NK1.1, Gr1, and TER119). In particular embodiments, HSC are identified by a CD164+ profile. In particular embodiments, HSC are identified by a CD34+/CD164+ profile. In particular embodiments, the CD34+/CD45RA-/CD90+ HSC population is selected. For additional information regarding HSC marker profiles, see WO2017/218948.

[0143] HSCs can differentiate into HSPCs. HSPCs can self-renew or can differentiate into (i) myeloid progenitor cells which ultimately give rise to monocytes and macrophages, neutrophils, basophils, eosinophils, erythrocytes, megakaryocytes/platelets, or dendritic cells; or (ii) lymphoid progenitor cells which ultimately give rise to T-cells, B-cells, and lymphocyte-like cells called natural killer cells (NK-cells). For a general discussion of hematopoiesis and HSPC differentiation, see Chapter 17, Differentiated Cells and the Maintenance of Tissues, Alberts et al., 1989, Molecular Biology of the Cell, 2nd Ed., Garland Publishing, New York, N.Y.; Chapter 2 of Regenerative Medicine, Department of Health and Human Services, Aug. 5, 2006, and Chapter 5 of Hematopoietic Stem Cells, 2009, Stem Cell Information, Department of Health and Human Services.

[0144] HSPCs can be positive for a specific marker expressed in increased levels on HSPCs relative to other types of hematopoietic cells. For example, such markers include CD34, CD43, CD45RO, CD45RA, CD59, CD90, CD109, CD117, CD133, CD166, HLA DR, or a combination thereof. Also, the HSPCs can be negative for an expressed marker relative to other types of hematopoietic cells. For example, such markers include Lin, CD38, or a combination thereof. Preferably, HSPCs are CD34+.

[0145] HSCs and HSPCs sources include umbilical cord blood, placental blood, bone marrow and peripheral blood (see U.S. Pat. Nos. 5,004,681; 7,399,633; and U.S. Pat. No. 7,147,626; Craddock et al., Blood. 90(12):4779-4788 (1997); Jin et al., Bone Marrow Transplant. 42(9):581-588 (2008); Jin et al., Bone Marrow Transplant. 42(7):455-459 (2008); Pelus, Curr. Opin. Hematol. 15(4):285-292 (2008); Papayannopoulou et al., Blood. 91:2231-2239 (1998); Tricot et al., Haematologica. 93(11):1739-1742 (2008); and Weaver et al., Bone Marrow Transplant. 27: S23-S29 (2001)), as well as fetal liver, and embryonic stem cells (ESC) and induced pluripotent stem cells (iPSCs) that can be differentiated into HSC. Methods regarding collection, anti-coagulation and processing, etc. of blood and tissue samples are well known in the art. See, for example, Alsever et al., J. Med. 41:126 (1941); De Gowin et al., J. Am. Med. Assoc. 114-:850 (1940); Smith et al., J. Thome. Cardiovasc. Surg. 38:573 (1959); Rous and Turner, J. Exp. Med. 23(2): 219-237 (1916); and Hum, Calif. Med. 108(3):218-224 (1968). Stem cell sources of HSCs and HSPCs also include aortal-gonadal-mesonephros derived cells, lymph, liver, thymus, and spleen from age-appropriate donors. All collected stem cell sources of HSCs and HSPCs can be screened for undesirable components and discarded, treated, or used according to accepted current standards at the time. These stem cell sources can be steady state/naïve or primed with mobilizing or growth factor agents.

[0146] In order to avoid surgical procedures to perform a bone marrow harvest to isolate HSCs or HSPCs, approaches that harvest stem cells from the peripheral blood can be preferred. Mobilization is a process whereby stem cells are stimulated out of the bone marrow (BM) niche into the peripheral blood (PB), and likely proliferate in the PB. Mobilization allows for a larger frequency of stem cells within the PB minimizing the number of days of apheresis, reaching target number collection of stem cells, and minimizing discomfort to the donor. Agents that enhance mobilization can either enhance proliferation in the PB, or enhance migration from the BM to PB, or both. Various mobilizing agents are described herein and/or known to those of skill in the art. et al. et al.

[0147] HSC and/or HSPC can be collected and isolated from a sample using any appropriate technique. Appropriate collection and isolation procedures include magnetic separation; fluorescence activated cell sorting (FACS; Williams et al., Dev. Biol. 112(1):126-134, 1985; Lu et al., Exp. Hematol. 14(10):955-962, 1986; Lu et al., Blood. 68(1):126-133, 1986); nanosorting based on fluorophore expression; affinity chromatography; cytotoxic agents joined to a monoclonal antibody or used in conjunction with a monoclonal antibody, e.g., complement and cytotoxins; “panning” with an antibody attached to a solid matrix; selective agglutination using a lectin such as soybean (Reisner et al., Lancet. 2(8208-8209): 1320-1324, 1980); immunomagnetic bead-based sorting or combinations of these techniques, etc. These techniques can also be used to assay for successful engraftment or manipulation of hematopoietic cells in vivo, for example for gene transfer, genetic editing or cell population expansion.

[0148] In particular embodiments, it is important to remove contaminating cell populations that would interfere with isolation of the intended cell population, such as red blood cells. Removing includes both biochemical and mechanical methods to remove the undesired cell populations. Examples include lysis of red blood cells using detergents, hetastarch, hetastarch with centrifugation, cell washing, cell washing with density gradient, Ficoll-hypaque, Sepx, Optipress, filters, and other protocols that have been used both in the manufacture of HSC and/or gene therapies for research and therapeutic purposes.

[0149] In particular embodiments, a sample can be processed to select/enrich for CD34+ cells using anti-CD34 antibodies directly or indirectly conjugated to magnetic particles in connection with a magnetic cell separator, for example, the CliniMACS® Cell Separation System (Miltenyi Biotec, Bergisch Gladbach, Germany). See also, sec. 5.4.1.1 of U.S. Pat. No. 7,399,633 which describes enrichment of CD34+ HSC/HSPC from 1-2% of a normal bone marrow cell population to 50-80% of the population. HSC can also be selected to achieve the HSC profiles noted above, such as CD34+/CD45RA−/CD90+ or CD34+/CD38−/CD45RA-/CD90+.

[0150] Similarly, HSPC expressing CD43, CD45RO, CD45RA, CD59, CD90, CD109, CD117, CD133, CD166, HLA DR, or a combination thereof, can be enriched for using antibodies against these antigens. U.S. Pat. No. 5,877,299 describes additional appropriate hematopoietic antigens that can be used to isolate, collect, and enrich HSPC cells from samples.

[0151] Following isolation and/or enrichment, HSC or HSPC can be expanded in order to increase the number of HSC/HSPC. Isolation and/or expansion methods are described in, for example, U.S. Pat. Nos. 7,399,633 and 5,004,681; US Patent Publication No. 2010/0183564; International Patent Publications No. WO 2006/047569; WO 2007/095594; WO 2011/127470; and WO 2011/127472; Varnum-Finney et al., Blood 101:1784-1789, 1993; Delaney et al., Blood 106:2693-2699, 2005; Ohishi et al., J. Clin. Invest. 110:1165-1174, 2002; Delaney et al., Nature Med. 16(2): 232-236, 2010; and Chapter 2 of Regenerative Medicine, Department of Health and Human Services, August 2006, and the references cited therein. Each of the referenced methods of collection, isolation, and expansion can be used in particular embodiments of the disclosure.

[0152] Particular methods of expanding HSC/HSPC include expansion with a Notch agonist. For information regarding expansion of HSC/HSPC using Notch agonists, see sec. 5.1 and 5.3 of U.S. Pat. Nos. 7,399,633; 5,780,300; 5,648,464; 5,849,869; and 5,856,441; WO 1992/119734; Schlondorfiand & Blobel, J. Cell Sci. 112:3603-3617, 1999; Olkkonen and Stenmark, Int. Rev. Cytol. 176:1-85, 1997; Kopan et al., Cell 137:216-233, 2009; Rebay et al., Cell 67:687-699, 1991 and Jarriault et al., Mol. Cell. Biol. 18:7423-7431, 1998.

[0153] Additional culture conditions can include expansion in the presence of one or more growth factors, such as: angiopoietin-like proteins (Angptls, e.g., Angptl2, Angptl3, Angptl7, Angpt15, and Mfap4); erythropoietin; fibroblast growth factor-1 (FGF-1); Flt-3 ligand (Flt-3L); G-CSF; GM-CSF; insulin growth factor-2 (IGF-2); interleukin-3 (IL-3); interleukin-6 (IL-6); interleukin-7 (IL-7); interleukin-11 (IL-11); stem cell factor (SCF; also known as the c-kit ligand or mast cell growth factor); thrombopoietin (TPO); and analogs thereof (wherein the analogs include any structural variants of the growth factors having the biological activity of the naturally occurring growth factor; see, e.g., WO 2007/1145227 and U.S. Patent Publication No. 2010/0183564).

[0154] As a particular example for expanding HSC/HSPC, the cells can be cultured on a plastic tissue culture dish containing immobilized Delta ligand and fibronectin and 50 ng/ml of each of SCF, Flt-3L and TPO.

[0155] Cells can be autologous or allogeneic in reference to a particular subject. In particular embodiments, the cells are part of an allograft. The cells, formulations, kits, and methods disclosed herein can be used to protect normal hematopoiesis from the effects of anti-CD33 therapies.

Engineering of Therapeutic and/or CD33-Expressing Cells

[0156] Cells can be genetically modified, e.g., to achieve inactivation of CD33, using any method known in the art. A wide variety of reagents and techniques are known in the art for the introduction of heterologous nucleic acid sequences (e.g., a nucleic acid sequence encoding a base editor and/or a gRNA, e.g., for inactivation of CD33) and can be applied in vitro, ex vivo, and/or in vivo.

[0157] Particular embodiments use a genetic construct or vector to deliver base editing components and optional therapeutic gene(s) in cells. A genetic construct is an artificially produced combination of nucleotides to express particular intended molecules.

[0158] Vectors include, e.g., plasmids, cosmids, viruses, and phage. Viral vectors refer to nucleic acid molecules that include virus-derived nucleic acid elements that facilitate transfer and expression of non-native genes within a cell. In particular embodiments, viral-mediated genetic modification can utilize, for example, retroviral vectors, lentiviral vectors, foamy viral vectors, adenoviral vectors, adeno-associated viral vectors, alpharetroviral vectors or gammaretroviral vectors.

[0159] In particular embodiments, retroviral vectors (see Miller et al., 1993, Meth. Enzymol. 217:581-599) can be used. In these embodiments, the gene to be expressed is cloned into the retroviral vector for its delivery into cells. In particular embodiments, a retroviral vector includes all of the cis-acting sequences necessary for the packaging and integration of the viral genome in the target cell, i.e., (a) a long terminal repeat (LTR), or portions thereof, at each end of the vector; (b) primer binding sites for negative and positive strand DNA synthesis; and (c) a packaging signal, necessary for the incorporation of genomic RNA into virions. More detail about retroviral vectors can be found in Boesen et al., 1994, Biotherapy 6:291-302; Clowes et al., 1994, J. Clin. Invest. 93:644-651; Kiem et al., 1994, Blood 83:1467-1473; Salmons and Gunzberg, 1993, Human Gene Therapy 4:129-141; and Grossman and Wilson, 1993, Curr. Opin. in Genetics and Devel. 3:110-114.

[0160] Lentiviral vectors or “lentivirus” refers to a genus of retroviruses that are capable of infecting dividing and non-dividing cells and typically produce high viral titers. Lentiviral vectors have been employed in gene therapy for a number of diseases. For example, hematopoietic gene therapies using lentiviral vectors or gammaretroviral vectors have been used for x-linked adrenoleukodystrophy and β-thalassemia. Several examples of lentiviruses include HIV (including HIV type 1, and HIV type 2); equine infectious anemia virus; feline immunodeficiency virus (FIV); bovine immune deficiency virus (BIV); and simian immunodeficiency virus (SIV).

[0161] In particular embodiments, other retroviral vectors can be used in the practice of the methods of the invention. These include, e.g., vectors based on human foamy virus (HFV) or other viruses in the Spumavirus genera.

[0162] Foamy viruses (FVes) are the largest retroviruses known today and are widespread among different mammals, including all non-human primate species, however they are absent in humans. This complete apathogenicity qualifies FV vectors as ideal gene transfer vehicles for genetic therapies in humans and clearly distinguishes FV vectors as gene delivery system from HIV-derived and also gammaretrovirus-derived vectors.

[0163] FV vectors are also suitable for gene therapy applications because they can (1) accommodate large transgenes (>9 kb), (2) transduce slowly dividing cells efficiently, and (3) integrate as a provirus into the genome of target cells, thus enabling stable long-term expression of the transgene(s). FV vectors do need cell division for the pre-integration complex to enter the nucleus, however the complex is stable for at least 30 days and still infective. The intracellular half-life of the FV pre-integration complex is comparable to the one of lentiviruses and significantly higher than for gammaretroviruses, therefore FVes are also, similar to lentivirus vectors, able to transduce rarely dividing cells. FV vectors are natural self-inactivating vectors and characterized by the fact that they seem to have hardly any potential to activate neighboring genes. In addition, FV vectors can enter any cells known (although the receptor is not identified yet) and infectious vector particles can be concentrated 100-fold without loss of infectivity due to a stable envelope protein. FV vectors achieve high transduction efficiency in pluripotent hematopoietic stem cells and have been used in animal models to correct monogenetic diseases such as leukocyte adhesion deficiency (LAD) in dogs and FA in mice. FV vectors are also used in preclinical studies of β-thalassemia.

[0164] Point mutations can be made in FVes to render them integration incompetent. For example, foamy viruses can be rendered integration incompetent by introducing point mutations into the highly conserved DD35E catalytic core motif of the foamy virus integrase sequence. See, for example, Deyle et al., J. Virol. 84(18): 9341-9349, 2010. As another example, an FV vector can be rendered integration deficient by introducing point mutations into the Pol gene of the FV vector. Representative FV Pol coding sequence (SEQ ID NO: 23) and FV Pol amino acid sequence (SEQ ID NO: 24) with indicated nucleotides (position 2636 A to C or position 2807 A to C) or amino acid residues (D to A at 879 or at 936), respectively, that can be mutated to render the FV vector integration deficient are provided.

[0165] Adenoviral vectors are an example of vectors that can be administered in concert with HSPC mobilization. In particular embodiments, administration of an adenoviral vector occurs concurrently with administration of one or more mobilization factors. In particular embodiments, administration of an adenoviral vector follows administration of one or more mobilization factors. In particular embodiments, administration of an adenoviral vector follows administration of a first one or more mobilization factors and occurs concurrently with administration of a second one or more mobilization factors.

[0166] In particular embodiments, adenoviruses (e.g., adenovirus 5 (Ad5), adenovirus 35 (Ad35), adenovirus 11 (Ad11), adenovirus 26 (Ad26), Ad5/35++, and helper-dependent forms thereof (e.g., helper-dependent Ad5/35++ or helper dependent Ad35), adeno-associated viruses (AAV; see, e.g., U.S. Pat. No. 5,604,090), and alphaviruses can be used. See Kozarsky and Wilson, 1993, Current Opinion in Genetics and Development 3:499-503, Rosenfeld et al., 1991, Science 252:431-434; Rosenfeld et al., 1992, Cell 68:143-155; Mastrangeli et al., 1993, J. Clin. Invest. 91:225-234; Walsh et al., 1993, Proc. Soc. Exp. Bioi. Med. 204:289-300; and Lundstrom, 1999, J. Recept. Signal Transduct. Res. 19: 673-686. Additional examples of viral vectors include those derived from cytomegaloviruses (CMV), flaviviruses, herpes viruses (e.g., herpes simplex), influenza viruses, papilloma viruses (e.g., human and bovine papilloma virus; see, e.g., U.S. Pat. No. 5,719,054), poxviruses, vaccinia viruses, modified vaccinia Ankara (MVA), NYVAC, or strains derived therefrom. Other examples include avipox vectors, such as a fowlpox vectors (e.g., FP9) or canarypox vectors (e.g., ALVAC and strains derived therefrom). As indicated, helper dependent forms of viral vectors may also be used.

[0167] Methods of using retroviral and lentiviral viral vectors and packaging cells for transducing mammalian host cells with viral particles including desired transgenes are described in, e.g., U.S. Pat. No. 8,119,772; Walchli et al., 2011, PLoS One 6:327930; Zhao et al., 2005, J. Immunol. 174:4415; Engels et al., 2003, Hum. Gene Ther. 14:1155; Frecha et al., 2010, Mol. Ther. 18:1748; and Verhoeyen et al., 2009, Methods Mol. Biol. 506:97. Retroviral and lentiviral vector constructs and expression systems are also commercially available.

[0168] Other vectors or targeted genetic engineering approaches may also be utilized. The CRISPR (Clustered Regularly Interspaced Short Palindromic Repeats)/Cas (CRISPR-associated protein) nuclease system is an engineered nuclease system used for genetic engineering that is based on a bacterial system. Information regarding CRISPR-Cas systems and components thereof are described in, for example, U.S. Pat. Nos. 8,697,359, 8,771,945, 8,795,965, 8,865,406, 8,871,445, 8,889,356, 8,889,418, 8,895,308, 8,906,616, 8,932,814, 8,945,839, 8,993,233 and 8,999,641 and applications related thereto; and WO2014/018423, WO2014/093595, WO2014/093622, WO2014/093635, WO2014/093655, WO2014/093661, WO2014/093694, WO2014/093701, WO2014/093709, WO2014/093712, WO2014/093718, WO2014/145599, WO2014/204723, WO2014/204724, WO2014/204725, WO2014/204726, WO2014/204727, WO2014/204728, WO2014/204729, WO2015/065964, WO2015/089351, WO2015/089354, WO2015/089364, WO2015/089419, WO2015/089427, WO2015/089462, WO2015/089465, WO2015/089473, WO2015/089486, WO2016/205711, WO2017/106657, WO2017/127807 and applications related thereto.

[0169] Particular embodiments utilize zinc finger nucleases (ZFNs) as gene editing agents. ZFNs are a class of site-specific nucleases engineered to bind and cleave DNA at specific positions. ZFNs are used to introduce double stranded breaks (DSBs) at a specific site in a DNA sequence which enables the ZFNs to target unique sequences within a genome in a variety of different cells. For additional information regarding ZFNs and ZFNs useful within the teachings of the current disclosure, see, e.g., U.S. Pat. Nos. 6,534,261; 6,607,882; 6,746,838; 6,794,136; 6,824,978; 6,866,997; 6,933,113; 6,979,539; 7,013,219; 7,030,215; 7,220,719; 7,241,573; 7,241,574; 7,585,849; 7,595,376; 6,903,185; 6,479,626; US 2003/0232410 and US 2009/0203140 as well as Gaj et al., Nat Methods, 2012, 9(8):805-7; Ramirez et al., Nucl Acids Res, 2012, 40(12):5560-8; Kim et al., Genome Res, 2012, 22(7): 1327-33; Urnov et al., Nature Reviews Genetics, 2010, 11:636-646; Miller et al. Nature Biotechnol. 25, 778-785 (2007); Bibikova et al. Science 300, 764 (2003); Bibikova et al., Genetics 161, 1169-1175 (2002); Wolfe et al. Annu. Rev. Biophys. Biomol. Struct. 29, 183-212 (2000); Kim et al. Proc. Natl. Acad. Sci. USA. 93, 1156-1160 (1996); and Miller et al. The EMBO journal 4, 1609-1614 (1985).

[0170] Particular embodiments can use transcription activator like effector nucleases (TALENs) as gene editing agents. TALENs refer to fusion proteins including a transcription activator-like effector (TALE) DNA binding protein and a DNA cleavage domain. TALENs are used to edit genes and genomes by inducing double DSBs in the DNA, which induce repair mechanisms in cells. Generally, two TALENs must bind and flank each side of the target DNA site for the DNA cleavage domain to dimerize and induce a DSB. For additional information regarding TALENs, see U.S. Pat. Nos. 8,440,431; 8,440,432; 8,450,471; 8,586,363; and 8,697,853; as well as Joung and Sander, Nat Rev Mol Cell Biot, 2013, 14(I):49-55; Beurdeley et al., Nat Commun, 2013, 4: 1762; Scharenberg et al., Curr Gene Ther, 2013, 13(4):291-303; Gaj et al., Nat Methods, 2012, 9(8):805-7; Miller et al. Nature biotechnology 29, 143-148 (2011); Christian et al. Genetics 186, 757-761 (2010); Boch et al. Science 326, 1509-1512 (2009); and Moscou, & Bogdanove, Science 326, 1501 (2009).

[0171] Particular embodiments can utilize MegaTALs as gene editing agents. MegaTALs have a single chain rare-cleaving nuclease structure in which a TALE is fused with the DNA cleavage domain of a meganuclease. Meganucleases, also known as homing endonucleases, are single peptide chains that have both DNA recognition and nuclease function in the same domain. In contrast to the TALEN, the megaTAL only requires the delivery of a single peptide chain for functional activity.

[0172] Other methods of gene delivery include use of artificial chromosome vectors such as mammalian artificial chromosomes (Vos, Curr. Opin. Genet. Dev. 8(3): 351-359, 1998) and yeast artificial chromosomes (YAC); liposomes (Tarahovsky and Ivanitsky, Biochemistry(Mosc) 63:607-618, 1998); ribozymes (Branch and Klotman, Exp. Nephrol. 6:78-83, 1998); and triplex DNA (Chan and Glazer, 1997, J. Mol. Med. 75:267-282). YAC are typically used when the inserted nucleic acids are too large for more conventional vectors (e.g., greater than 12 kb).

[0173] When targeted genome editing approaches are utilized, genes can be inserted within genomic safe harbors. Genomic safe harbor sites are intragenic or extragenic regions of the genome that are able to accommodate the predictable expression of newly integrated DNA, generally without adverse effects on the host cell. A useful safe harbor can permit sufficient transgene expression to yield desired levels of the encoded molecule. In various embodiments, a genomic safe harbor site does not alter cellular functions. Methods for identifying genomic safe harbor sites are described in Sadelain et al., Nature Reviews (2012); 12:51-58; and Papapetrou et al., Nat Biotechnol. (1):73-8, 2011. In particular embodiments, a genomic safe harbor site meets one or more (one, two, three, four, or five) of the following criteria: (i) distance of at least 50 kb from the 5′ end of any gene, (ii) distance of at least 300 kb from any cancer-related gene, (iii) within an open/accessible chromatin structure (measured by DNA cleavage with natural or engineered nucleases), (iv) location outside a gene transcription unit and (v) location outside ultraconserved regions (UCRs), microRNA or long non-coding RNA of the genome.

[0174] In particular embodiments, a genomic safe harbor meets criteria described herein and also demonstrates a 1:1 ratio of forward:reverse orientations of lentiviral integration further demonstrating the loci does not impact surrounding genetic material.

[0175] Particular genomic safe harbors sites include CCRS, HPRT, AAVS1, Rosa and albumin. See also, e.g., U.S. Pat. Nos. 7,951,925 and 8,110,379; US Publication Nos. 20080159996; 201000218264; 20120017290; 20110265198; 20130137104; 20130122591; 20130177983 and 20130177960 for additional information and options for appropriate genomic safe harbor integration sites.

[0176] The vectors and genetic engineering approaches described herein are used to deliver genes to cells for expression. Therapeutically effective amounts of vectors (e.g., viral vectors) can be administered through any appropriate administration route such as by, injection, infusion, perfusion, and more particularly by administration by one or more of bone marrow, intravenous, intradermal, intraarterial, intranodal, intralymphatic, intraperitoneal injection, infusion, or perfusion).Delivery can utilize any appropriate technique, such as transfection, electroporation, microinjection, lipofection, calcium phosphate mediated transfection, infection with a viral or bacteriophage vector including the gene sequences, cell fusion, chromosome-mediated gene transfer, microcell-mediated gene transfer, spheroplast fusion, in vivo nanoparticle-mediated delivery, etc. Numerous techniques are known in the art for the introduction of foreign genes into cells (see e.g., Loeffler and Behr, Meth. Enzymol. 217:599-618, 1993; Cohen et al., Meth. Enzymol. 217:618-644, 1993; Cline, Pharmac. Ther. 29:69-92, 1985) and may be used, provided that the necessary developmental and physiological functions of the recipient cells are not unduly disrupted. The technique can provide for the stable transfer of the gene to the cell, so that the gene is expressible by the cell and, in certain instances, preferably heritable and expressible by its cell progeny.

[0177] In particular embodiments, the efficiency of integration, the size of the DNA sequence that can be integrated, and the number of copies of a DNA sequence that can be integrated into a genome can be improved by using transposons. Transposons or transposable elements include a short nucleic acid sequence with terminal repeat sequences upstream and downstream. Active transposons can encode enzymes that facilitate the excision and insertion of nucleic acid into a target DNA sequence.

[0178] A number of transposable elements have been described in the art that facilitate insertion of nucleic acids into the genome of vertebrates, including humans. Examples include Sleeping Beauty® (Regents of the University of Minnesota, Minneapolis, Minn.) (e.g., derived from the genome of salmonid fish); piggyBac® (Poseida Therapeutics, Inc. San Diego Calif.) (e.g., derived from lepidopteran cells and/or the Myotis lucifugus); mariner (e.g., derived from Drosophila); frog prince (e.g., derived from Rana pipiens); Tol2 (e.g., derived from medaka fish); TcBuster (e.g., derived from the red flour beetle Tribolium castaneum) and spinON.

[0179] In particular embodiments, vectors provide cloning sites to facilitate transfer of the polynucleotide sequences. Such vector cloning sites include at least one restriction endonuclease recognition site positioned to facilitate excision and insertion, in reading frame, of polynucleotide segments. Any of the restriction sites known in the art can be utilized. Most commercially available vectors already contain multiple cloning site (MCS) or polylinker regions. In addition, genetic engineering techniques useful to incorporate new and unique restriction sites into a vector are known and routinely practiced by persons of ordinary skill in the art. A cloning site can involve as few as one restriction endonuclease recognition site to allow for the insertion or excision of a single polynucleotide fragment. More typically, two or more restriction sites are employed to provide greater control of for example, insertion (e.g., direction of insert), and greater flexibility of operation (e.g., the directed transfer of more than one polynucleotide fragment). Multiple restriction sites can be the same or different recognition sites.

[0180] In particular embodiments, the gene sequence encoding any of these sequences can have one or more restriction enzyme sites at the 5′ and/or 3′ ends of the coding sequence in order to provide for easy excision and replacement of the gene sequence encoding the sequence with another gene sequence encoding a different sequence. In particular embodiments, each of the restriction sites is unique in the vector and different from the other restriction sites. In particular embodiments, each of the restriction sites are identical to the other restriction sites.

[0181] For additional information regarding procedures for genetic modification, see Anderson, Science 256:808-813 (1992); Nabel & Feigner, TIBTECH 11:211-217 (1993); Mitani & Caskey, TIBTECH 11:162-166 (1993); Dillon, TIBTECH 11:167-175 (1993); Miller, Nature 357:455-460 (1992); Van Brunt, Biotechnology 6(10):1149-1154 (1988); Vigne, Restorative Neurology and Neuroscience 8:35-36 (1995); Kremer & Perricaudet, British Medical Bulletin 51(1):31-44 (1995); Haddada et al., in Current Topics in Microbiology and Immunology Doerfler and Bohm (eds) (1995); and Yu et al., Gene Therapy 1:13-26 (1994).

[0182] Those of skill in the art will further appreciate that a base editing enzyme and/or a gRNA can be operably linked to a regulatory sequence such as a promoter, and that many such regulatory sequences are known in the art. These regulatory sequences can be eukaryotic or prokaryotic in nature. In particular embodiments, the regulatory sequence can result in the constitutive expression of the therapeutic sequence or protein upon entry of the vector into the cell. Alternatively, the regulatory sequences can include inducible sequences. Inducible regulatory sequences are well known to those skilled in the art and are those sequences that require the presence of an additional inducing factor to result in expression of the one or more molecules. Examples of suitable regulatory sequences include binding sites corresponding to tissue-specific transcription factors based on endogenous nuclear proteins, sequences that direct expression in a specific cell type, the lac operator, the tetracycline operator and the steroid hormone operator. Any inducible regulatory sequence known to those of skill in the art may be used.

[0183] In particular embodiments, the PGK promoter is used to drive expression of a therapeutic gene. In particular embodiments, the PGK promoter is derived from the human gene encoding phosphoglycerate kinase (PGK). In particular embodiments, the PGK promoter includes binding sites for the Rap1p, Abflp, and/or Gcrlp transcription factors. In particular embodiments, the PGK promoter includes 500 base pairs: Start (0); StyI (21); NspI-SphI (40); BpmI-Eco57MI (52); BaeGI-Bme1580I (63); AgeI (111); BsmBI-SpeI (246); BssS αI (252); BIpI (274); BsrDI (285); StuI (295); BgII (301); EaeI (308); AIwNI (350); EcoO1091-PpuMI (415); BspEI (420); BsmI (432); Earl (482); End (500). A PGK promoter sequence is provided in SEQ ID NO: 25.

[0184] In particular embodiments, RNA polymerase III (also called Pol III) promoters can be used to drive expression of a therapeutic gene. Pol III transcribes DNA to synthesize ribosomal 5S rRNA, tRNA, and other small RNAs. The Pol III promoters generally have well-defined initiation and stop sites and their transcripts lack poly(A) tails. The termination signal for these promoters is defined by the polythymidine tract, and the transcript is typically cleaved after the second uridine.

[0185] Additional exemplary promoters are known in the art and include galactose inducible promoters, pGAL1, pGAL1-10, pGal4, and pGa110; cytochrome c promoter, pCYC1; and alcohol dehydrogenase 1 promoter, pADH1, EF1alpha.

[0186] A promoter can be a non-coding genomic DNA sequence, usually upstream (5′) to the relevant coding sequence, to which RNA polymerase binds before initiating transcription. This binding aligns the RNA polymerase so that transcription will initiate at a specific transcription initiation site. The nucleotide sequence of the promoter determines the nature of the enzyme and other related protein factors that attach to it and the rate of RNA synthesis. The RNA is processed to produce messenger RNA (mRNA) which serves as a template for translation of the RNA sequence into the amino acid sequence of the encoded polypeptide. The 5′ non-translated leader sequence is a region of the mRNA upstream of the coding region that may play a role in initiation and translation of the mRNA. The 3′ transcription termination/polyadenylation signal is a non-translated region downstream of the coding region that functions in the plant cell to cause termination of the RNA synthesis and the addition of polyadenylate nucleotides to the 3′ end.

[0187] Promoters can include general promoters, tissue-specific promoters, cell-specific promoters, and/or promoters specific for the cytoplasm. Promoters may include strong promoters, weak promoters, constitutive expression promoters, and/or inducible (conditional) promoters. Inducible promoters direct or control expression in response to certain conditions, signals, or cellular events. For example, the promoter may be an inducible promoter that requires a particular ligand, small molecule, transcription factor, hormone, or hormone protein in order to effect transcription from the promoter. Particular examples of promoters include the AFP (α-fetoprotein) promoter, amylase 1C promoter, aquaporin-5 (AP5) promoter, αI-antitrypsin promoter, β-act promoter, β-globin promoter, β-Kin promoter, B29 promoter, CCKAR promoter, CD14 promoter, CD43 promoter, CD45 promoter, CD68 promoter, CEA promoter, c-erbB2 promoter, COX-2 promoter, CXCR4 promoter, desmin promoter, E2F-1 promoter, human elongation factor Iα promoter (EFIα), CMV (cytomegalovirus viral) promoter, minCMV promoter, SV40 (simian virus 40) immediately early promoter, EGR1 promoter, eIF4A1 promoter, elastase-1 promoter, endoglin promoter, FerH promoter, FerL promoter, fibronectin promoter, Flt-1 promoter, GAPDH promoter, GFAP promoter, GPIIb promoter, GRP78 promoter, GRP94 promoter, HE4 promoter, hGR1/1 promoter, hNIS promoter, Hsp68 promoter, the Hsp68 minimal promoter (proHSP68), HSP70 promoter, HSV-1 virus TK gene promoter, hTERT promoter, ICAM-2 promoter, kallikrein promoter, LP promoter, major late promoter (MLP), Mb promoter, Rho promoter, MT (metallothionein) promoter, MUC1 promoter, NphsI promoter, OG-2 promoter, PGK (Phospho Glycerate kinase) promoters, PGK-1 promoter, polymerase III (Pol III) promoter, PSA promoter, ROSA promoter, SP-B promoter, Survivn promoter, SYN1 promoter, SYT8 gene promoter, TRP1 promoter, Tyr promoter, ubiquitin B promoter, WASP promoter, and the Rous Sarcoma Virus (RSV) long-terminal repeat (LTR) promoter

[0188] Promoters may be obtained as native promoters or composite promoters. Native promoters, or minimal promoters, refer to promoters that include a nucleotide sequence from the 5′ region of a given gene. A native promoter includes a core promoter and its natural 5′UTR. In particular embodiments, the 5′UTR includes an intron. Composite promoters refer to promoters that are derived by combining promoter elements of different origins or by combining a distal enhancer with a minimal promoter of the same or different origin.

[0189] In particular embodiments, the SV40 promoter includes the sequence set forth in SEQ ID NO: 26. In particular embodiments, the dESV40 promoter (SV40 promoter with deletion of the enhancer region) includes the sequence set forth in SEQ ID NO: 27. In particular embodiments, the human telomerase catalytic subunit (hTERT) promoter includes the sequence set forth in SEQ ID NO: 28. In particular embodiments, the RSV promoter derived from the Schmidt-Ruppin A strain includes the sequence set forth in SEQ ID NO: 29. In particular embodiments, the hNIS promoter includes the sequence set forth in SEQ ID NO: 30. In particular embodiments, the human glucocorticoid receptor 1A (hGR 1/Ap/e) promoter includes the sequence set forth in SEQ ID NO: 31.

[0190] In particular embodiments, promoters include wild type promoter sequences and sequences with optional changes (including insertions, point mutations or deletions) at certain positions relative to the wild-type promoter. In particular embodiments, promoters vary from naturally occurring promoters by having 1 change per 20-nucleotide stretch, 2 changes per 20-nucleotide stretch, 3 changes per 20-nucleotide stretch, 4 changes per 20-nucleotide stretch, or 5 changes per 20-nucleotide stretch. In particular embodiments, the natural sequence will be altered in 1, 2, 3, 4, 5, 6, 7, 8, 9, or 10 bases. The promoter may vary in length, including from 50 nucleotides of LTR sequence to 100, 200, 250 or 350 nucleotides of LTR sequence, with or without other viral sequence.

[0191] Some promoters are specific to a tissue or cell and some promoters are non-specific to a tissue or cell. Each gene in mammalian cells has its own promoter and some promoters can only be activated in certain cell types. A non-specific promoter, or ubiquitous promoter, aids in initiation of transcription of a gene or nucleotide sequence that is operably linked to the promoter sequence in a wide range of cells, tissues and cell cycles. In particular embodiments, the promoter is a non-specific promoter. In particular embodiments, a non-specific promoter includes CMV promoter, RSV promoter, SV40 promoter, mammalian elongation factor 1α (EF1α) promoter, β-act promoter, EGR1 promoter, eIF4A1 promoter, FerH promoter, FerL promoter, GAPDH promoter, GRP78 promoter, GRP94 promoter, HSP70 promoter, β-Kin promoter, PGK-1 promoter, ROSA promoter, and/or ubiquitin B promoter.

[0192] A specific promoter aids in cell specific expression of a nucleotide sequence that is operably linked to the promoter sequence. In particular embodiments, a specific promoter is active in a B cells, monocytic cells, leukocytes, macrophages, pancreatic acinar cells, endothelial cells, astrocytes, and/or any other cell type or cell cycle. In particular embodiments, the promoter is a specific promoter. In particular embodiments, an SYT8 gene promoter regulates gene expression in human islets (Xu et al., Nat Struct Mol Biol., 18: 372-378, 2011). In particular embodiments, kallikrein promoter regulates gene expression in ductal cell specific salivary glands. In particular embodiments, the amylase 1C promoter regulates gene expression in acinar cells. In particular embodiments, the aquaporin-5 (AP5) promoter regulates gene expression in acinar cells (Zheng and Baum, Methods Mol Biol., 434: 205-219, 2008). In particular embodiments, the B29 promoter regulates gene expression in B cells. In particular embodiments, the CD14 promoter regulates gene expression in monocytic cells. In particular embodiments, the CD43 promoter regulates gene expression in leukocytes and platelets. In particular embodiments, the CD45 promoter regulates gene expression in hematopoietic cells. In particular embodiments, the CD68 promoter regulates gene expression in macrophages. In particular embodiments, the desmin promoter regulates gene expression in muscle cells. In particular embodiments, the elastase-1 promoter regulates gene expression in pancreatic acinar cells. In particular embodiments, the endoglin promoter regulates gene expression in endothelial cells. In particular embodiments, the fibronectin promoter regulates gene expression in differentiating cells or healing tissue. In particular embodiments, the Flt-1 promoter regulates gene expression in endothelial cells. In particular embodiments, the GFAP promoter regulates gene expression in astrocytes. In particular embodiments, the GPIIb promoter regulates gene expression in megakaryocytes. In particular embodiments, the ICAM-2 promoter regulates gene expression in endothelial cells. In particular embodiments, the Mb promoter regulates gene expression in muscle. In particular embodiments, the NphsI promoter regulates gene expression in podocytes. In particular embodiments, the OG-2 promoter regulates gene expression in osteoblasts, odontoblasts. In particular embodiments, the SP-B promoter regulates gene expression in lung cells. In particular embodiments, the SYN1 promoter regulates gene expression in neurons. In particular embodiments, the WASP promoter regulates gene expression in hematopoietic cells.

[0193] In particular embodiments, the promoter is a tumor-specific promoter. In particular embodiments, the AFP promoter regulates gene expression in hepatocellular carcinoma. In particular embodiments, the CCKAR promoter regulates gene expression in pancreatic cancer. In particular embodiments, the CEA promoter regulates gene expression in epithelial cancers. In particular embodiments, the c-erbB2 promoter regulates gene expression in breast and pancreas cancer. In particular embodiments, the COX-2 promoter regulates gene expression in tumors. In particular embodiments, the CXCR4 promoter regulates gene expression in tumors. In particular embodiments, the E2F-1 promoter regulates gene expression in tumors. In particular embodiments, the HE4 promoter regulates gene expression in tumors. In particular embodiments, the LP promoter regulates gene expression in tumors. In particular embodiments, the MUC1 promoter regulates gene expression in carcinoma cells. In particular embodiments, the PSA promoter regulates gene expression in prostate and prostate cancers. In particular embodiments, the Survivn promoter regulates gene expression in tumors. In particular embodiments, the TRP1 promoter regulates gene expression in melanocytes and melanoma. In particular embodiments, the Tyr promoter regulates gene expression in melanocytes and melanoma.

[0194] In certain particular embodiments, a base editing agent and/or a base editing system of the present disclosure is present in an adenoviral vector. However, those of skill in the art will appreciate that base editing agents and/or systems of the present disclosure and nucleic acid sequences encoding the same can be present in any context or form, e.g., in a vector that is not an adenoviral vector, e.g., in a plasmid. Nucleotide sequences encoding base editing systems as disclosed herein are typically too large for inclusion in many limited-capacity vector systems, but the large capacity of adenoviral vectors permits inclusion of such sequences in adenoviral vectors and genomes of the present disclosure. Indeed, as discussed elsewhere herein, adenoviral vectors can include payloads that encode a base editing system and further encode one or more additional coding sequences. An additional advantage of adenoviral vectors and genomes as disclosed herein for gene therapy with payloads encoding base editors of the present disclosure is that adenoviral genomes do not naturally integrate into host cell genomes, which facilitates transient expression of base editing systems, which can be desirable, e.g., to avoid and/or reduce immunogenicity and/or genotoxicity.

[0195] Treatments using in viva gene therapy, which includes the direct delivery of a viral vector to a patient, have been explored. In vivo gene therapy is an attractive approach because it may not require any genotoxic conditioning (or could require less genotoxic conditioning) nor ex vivo cell processing and thus could be adopted at many institutions worldwide, including those in developing countries, as the therapy could be administered through an injection, similar to what is already done worldwide for the delivery of vaccines. In various embodiments methods of in vivo gene therapy with adenoviral vectors of the present disclosure can include one or more steps of (i) target cell mobilization, (ii) immunosuppression, (iii) administration of a vector, genome, system or formulation provided herein, and/or (iv) selection of transduced cells and/or cells that have integrated an integration element of a payload of an adenoviral vector or genome.

[0196] Adenovirus (or, interchangeably, “adenoviral”) vectors and genomes refer to those constructs containing adenovirus sequences sufficient to (a) support packaging of an expression construct and to (b) express a coding sequence. Adenoviral genomes can be linear, double-stranded DNA molecules. As those of skill in the art will appreciate, a linear genome such as an adenoviral genome can be present in circular plasmid, e.g., for viral production purposes.

[0197] Natural adenoviral genomes range from 26 kb to 45 kb in length, depending on the serotype.

[0198] Adenoviral vectors include Adenoviral DNA flanked on both ends by inverted terminal repeats (ITRs), which act as a self-primer to promote primase-independent DNA synthesis and to facilitate integration into the host genome. Adenoviral genomes also contain a packaging sequence, which facilities proper viral transcript packaging and is located on the left arm of the genome. Viral transcripts encode several proteins including early transcriptional units, E1, E2, E3, and E4 and late transcriptional units which encode structural components of the Ad virion (Lee et al., Genes Dis., 4(2):43-63, 2017).

[0199] Adenoviral vectors include adenoviral genomes. Recombinant adenoviral vectors are adenoviral vectors that include a recombinant adenoviral genome. A recombinant adenoviral vector includes a genetically engineered form of an adenovirus. Those of skill in the art will appreciate that throughout the present application disclosure of an adenoviral vector includes disclosure of the adenoviral genome thereof, and that disclosure of an adenoviral genome includes disclosure of an adenoviral vector including the disclosed adenoviral genome.

[0200] The adenovirus is a large, icosahedral-shaped, non-enveloped virus. The viral capsid includes three types of proteins including fiber, penton, and hexon based proteins. The hexon makes up the majority of the viral capsid, forming the 20 triangular faces. The penton base is located at the 12 vertices of the capsid and the fiber (also referred to as knobbed fiber) protrudes from each penton base. These proteins, the penton and fiber, are of particular importance in receptor binding and internalization as they facilitate the attachment of the capsid to a host cell (Lee et al., Genes Dis., 4(2):43-63, 2017).

[0201] Ad35 fiber is a fiber protein trimer, each fiber protein including an N-terminal tail domain that interacts with the pentameric penton base, a C-terminal globular knob domain (fiber knob) that functions as the attachment site for the host cell receptors, and a central shaft domain that connects the tail and the knob domains (shaft). The tail domain of the trimeric fiber attaches to the pentameric penton base at the 5-fold axis. In various embodiments, an Ad35 fiber knob includes amino acids 123 to 320 of a canonical wild-type Ad35 fiber protein. In various embodiments, an Ad35 fiber knob includes at least 60 amino acids (e.g., at least 60, 70, 80, 90, 100, 110, 120, 130, 140, 150, 160, 170, 180, 190, or 198 amino acids) having at least 80% (e.g., at least 80%, 85%, 90%, 95%, 96%, 97%, 98%, or 99% sequence identity) sequence identity with a corresponding fragment of amino acids 123 to 320 of a canonical wild-type Ad35 fiber protein. In various embodiments, a fiber knob is engineered for increased affinity with CD46, and/or to confer increased affinity with CD46 to a fiber protein, fiber, or vector, as compared to a reference fiber knob, fiber protein, fiber or vector including a canonical wild-type Ad35 fiber protein, optionally wherein the increase is an increase of at least 1.1-fold, e.g., at least 1, 2, 3, 4, 5, 10, 15, or 20-fold. The central shaft domain consists of 5.5 p-repeats, each containing 15-20 amino acids that code for two anti-parallel β-strands connected by a β-turn. The β-repeats connect to form an elongated structure of three intertwined spiraling strands that is highly rigid and stable.

[0202] Adenovirus is particularly suitable for use as a gene transfer vector because of its mid-sized genome, ease of manipulation, high titer, wide target-cell range and high infectivity. Both ends of the viral genome contain 100-200 base pair ITRs, which are cis elements necessary for viral DNA replication and packaging. The early (E) and late (L) regions of the genome contain different transcription units that are divided by the onset of viral DNA replication. The E1 region (E1 A and E1B) encodes proteins responsible for the regulation of transcription of the viral genome and a few cellular genes. The expression of the E2 region (E2A and E2B) results in the synthesis of the proteins for viral DNA replication. These proteins are involved in DNA replication, late gene expression and host cell shut-off. The products of the late genes, including the majority of the viral capsid proteins, are expressed only after significant processing of a single primary transcript issued by the major late promoter (MLP). The MLP is particularly efficient during the late phase of infection, and all the mRNAs issued from this promoter possess a 5′-tripartite leader (TPL) sequence which makes them preferred mRNAs for translation.

[0203] Among adenoviruses, there are also over 50 serotypes. Adenovirus type 5 is a human adenovirus about which a great deal of biochemical and genetic information is known, and it has historically been used for most constructions employing adenovirus as a vector. Ad5 has been widely used in gene therapy research.

[0204] Ad35 is one of the rarest of the 57 known human serotypes, with a seroprevalence of <7% and no cross-reactivity with Ad5. Ad35 is less immunogenic than Ad5, which is, in part, due to attenuation of T-cell activation by the Ad35 fiber knob. Further, after intravenous (iv) injection, there is only minimal transduction (only detectable by PCR) of tissues, including the liver, in human CD46 transgenic (hCD46tg) mice and non-human primates. First-generation Ad35 vectors have been used clinically for vaccination purposes.

[0205] The complete genome of a representative natural Ad35 adenovirus is known and publicly available (see, e.g., Gao et al., 2003 Gene Ther. 10(23): 1941-9; Reddy et al. 2003 Virology 311(2): 384-393; GenBank Accession No. AX049983). While the Ad5 genome is 35,935 bp with a G+C content of 55.2%, the Ad35 genome is 34,794 bp with a G+C content of 48.9%. The genome of Ad35 is flanked by inverted terminal repeats (ITRs). In various embodiments, Ad35 ITRS include 137 bp (e.g., a 5′ Ad35 that includes nucleotides 1-137 or 4-140 of GenBank Accession No. AX049983 and a 3′ ITR that includes nucleotides 34658-34794 of GenBank Accession No. AX049983), which are longer than those of Ad5 (103 bp). In various embodiments, an Ad35 5′ ITR includes at least 80 nucleotides (e.g., at least 80, 90, 100, 110, 120, 130, 140, 150, 160, 170, 180, 190, or 200 nucleotides, e.g., a number of nucleotides having a lower bound of 80, 90, 100, 110, 120, or 130 nucleotides and an upper bound of 130, 140, 150, 160, 170, 180, 190, or 200 nucleotides, e.g., 137 nucleotides) having at least 80% sequence identity (e.g., at least 80%, 85%, 90%, 95%, 96%, 97%, 98%, or 99% sequence identity) with a corresponding fragment of nucleotides 1-200 of GenBank Accession No. AX049983 and an Ad35 3′ ITR includes at least 80 nucleotides (e.g., at least 80, 90, 100, 110, 120, 130, 140, 150, 160, 170, 180, 190, or 200 nucleotides, e.g., a number of nucleotides having a lower bound of 80, 90, 100, 110, 120, or 130 nucleotides and an upper bound of 130, 140, 150, 160, 170, 180, 190, or 200 nucleotides, e.g., 137 nucleotides) having at least 80% sequence identity (e.g., at least 80%, 85%, 90%, 95%, 96%, 97%, 98%, or 99% sequence identity) with a corresponding fragment of nucleotides 34595-34794 of GenBank Accession No. AX049983. In various embodiments, an ITR is sufficient for one or both of Ad35 encapsidation and/or replication. In various embodiments, an Ad35 ITR sequence for Ad35 vectors differs in that the first 8 bp are CTATCTAT rather than CATCATCA (Wunderlich, J. Gen Viro. 95: 1574-1584, 2014).

[0206] In various embodiments, packaging of the adenovirus genome is mediated by a cis-acting packaging sequence domain located at the 5′ end of the viral genome adjacent to the ITR, and packaging occurs in a polar fashion from left to right. The packaging sequence of Ad35 is located at the left end of the genome with five to seven putative “A” repeats. In various embodiments, the present disclosure includes a recombinant Ad35 donor vector or genome that includes an Ad35 packaging sequence. In various embodiments, the present disclosure includes a recombinant Ad35 helper vector or genome that includes a packaging sequence flanked by recombinase sites. In various embodiments, an Ad35 packaging sequence refers to a nucleic acid sequence including nucleotides 138-481 of GenBank Accession No. AX049983 or a fragment thereof sufficient for or required for packaging of an Ad35 vector or genome (e.g., such that flanking of the sequence with recombinase sites and excision by recombination of the recombinase sites renders the vector or genome deficient for packaging, e.g., by at least 10% as compared to a reference including the packaging sequence, e.g., by at least 10%, 20%, 30%, 40$, 50%, 60%, 70%, 80%, 90%, 91%, 92%, 93%, 94%, 95%, 96%, 97%, 98%, 99%, or 100%, optionally wherein the reference includes the packaging sequence flanked by the recombines sites). In various embodiments, an Ad35 packaging sequence includes at least 80 nucleotides (e.g., at least 80, 90, 100, 110, 120, 130, 140, 150, 160, 170, 180, 190, 200, 225, 250, 275, or 300 nucleotides, e.g., a number of nucleotides having a lower bound of 80, 90, 100, 110, 120, 130, 140, or 150 nucleotides and an upper bound of 150, 160, 170, 180, 190, 200, 225, 250, 275, or 300 nucleotides) having at least 80% sequence identity (e.g., at least 80%, 85%, 90%, 95%, 96%, 97%, 98%, or 99% sequence identity) with a corresponding fragment of nucleotides 137-481 of GenBank Accession No. AX049983.

[0207] In various embodiments, an Ad35 helper vector can include recombinase sites inserted to flank a packaging sequence, where a first recombinase site is inserted immediately adjacent to (e.g., before, or after) a position selected from between nucleotide 130 and nucleotide 400 (e.g., between nucleotides 138 and 180, 138 and 200, 138 and 220, 138 and 240, 138 and 260, 138 and 280, 138 and 300, 138 and 320, 138 and 340, 138 and 360, 138 and 366, 138 and 380, or 138 and 400) and a second recombinase site inserted immediately adjacent to (e.g., after, or before) a position selected from between nucleotide 300 and nucleotide 550 (e.g., between nucleotides 344 and 360, 344 and 380, 344 and 400, 344 and 420, 344 and 440, 344 and 460, 344 and 480, 344 and 481, 344 and 500, 344 and 520, 344 and 540, or 344 and 550). Those of skill in the art will appreciate that the term packaging sequence does not necessarily include all of the packaging elements present in a given vector or genome. For example, a helper genome can include recombinase direct repeats that flank a packaging sequence, where the flanked packaging sequence does not include all of the packaging elements present in the helper genome. Accordingly, in certain embodiments, one or two recombinase direct repeats of a helper genome are positioned within a larger packaging sequence, e.g., such that a larger packaging sequence is rendered noncontiguous by introduction of the one or two recombinase direct repeats. In various embodiments, recombinase direct repeats of a helper genome flank a fragment of the packaging sequence such that excision of the flanked packaging sequence by recombination of the recombinase direct repeats reduces or eliminates (more generally, disrupts) packaging of the helper genome and/or ability of the helper genome to be packaged. By way of example, recombinase direct repeats (DRs) are positioned within 550 nucleotides of the 5′ end of the Ad35 genome in order to functionally disrupt the Ad35 packaging signal but not the 5′ Ad35 ITR. In various embodiments, the DRs are positioned closer than 550 nucleotides from the 5′ end of the Ad35 genome, for instance within 540, 530, 520, 510, 500, 495,490, 480, 470, 450, 440, 400, 380, 360 nucleotides, or closer than within 360 nucleotides of the 5′ end of the Ad35 genome, in order to functionally disrupt the Ad35 packaging signal but not the 5′ Ad35 ITR.

[0208] In various embodiments, the present disclosure includes a recombinant Ad35 donor vector or genome that includes an Ad35 5′ ITR, an Ad35 packaging sequence, and an Ad35 3′ ITR, In certain embodiments, an Ad35 5′ ITR, an Ad35 packaging sequence, and an Ad35 3′ ITR are the only fragments of the recombinant Ad35 donor vector or genome (e.g., the only fragments over 50 or over 100 base pairs) that are derived from, and/or have at least 80% identity to, a canonical Ad35 genome.

[0209] Ad35 early regions include E1A, E1B, E2A, E2B, E3, and E4. Ad35 intermediate regions include pIX and IVa2. The late transcription unit of Ad35 is transcribed from the major late promoter (MLP), located at 16.9 map units. The late mRNAs in Ad35 can be divided into five families of mRNAs (L1-L5), depending on which poly(A) signal is used by these mRNAs. Based on the MLP consensus initiator element, and splice donor and splice acceptor site sequences, the length of tripartite leader (TPL) has been predicted to be 204 nucleotides. The first leader of the TPL, which is adjacent to MLP, is 45 nucleotides in length. The second leader located within the coding region of DNA polymerase is 72 nucleotides in length. The third leader lies within the coding region of precursor terminal protein (pTP) of E2B region and is 87 nucleotides in length. While Ad5 contains two virus-associated (VA) RNA genes, only one virus-associated RNA gene occurs in the genome of Ad35. This VA RNA gene is located between the genes coding for the 52/55K L1 protein and pTP.

[0210] In particular embodiments, an Ad35++ vector is a chimeric vector with a mutant Ad35 fiber knob (e.g., a recombinant Ad35 vector with a mutant Ad35 fiber knob or an Ad5/35 vector with a mutant Ad35 fiber knob). In particular embodiments, an Ad35++ genome is a genome that encodes a mutant Ad35 fiber knob (e.g., a recombinant Ad35 helper genome encoding a mutant Ad35 fiber knob or an Ad5/35 helper genome encoding a mutant Ad35 fiber knob). In various embodiments, an Ad35++ mutant fiber knob is an Ad35 fiber knob mutated to increase the affinity to CD46, e.g., by 25-fold, e.g., such that the Ad35++ mutant fiber knob increases cell transduction efficiency, e.g., at lower multiplicity of infection (MOI) (Li and Lieber, FEBS Letters, 593(24): 3623-3648, 2019).

[0211] In various embodiments, an Ad35++ mutant fiber knob includes at least one mutation selected from Ile192Val, Asp207Gly (or Glu207Gly in certain Ad35 sequences), Asn217Asp, Thr226Ala, Thr245Ala, Thr254Pro, Ile256Leu, Ile256Val, Arg259Cys, and Arg279His. In various embodiments, an Ad35++ mutant fiber knob includes each of the following mutations: Ile192Val, Asp207Gly (or Glu207Gly in certain Ad35 sequences), Asn217Asp, Thr226Ala, Thr245Ala, Thr254Pro, Ile256Leu, Ile256Val, Arg259Cys, and Arg279His. In various embodiments, amino acid numbering of an Ad35 fiber is according to GenBank accession AP_000601 or an amino acid sequence corresponding thereto, e.g., where position 207 is Glu or Asp. In various embodiments, an Ad35 fiber has an amino acid sequence according to GenBank accession AP_000601. Further description of Ad35++ fiber knob mutations is found in Wang J. Virol. 82(21): 10567-10579, 2008, which is incorporated herein by reference in its entirety and with respect to fiber knobs.

[0212] Ad5/35 vectors of the present disclosure include adenoviral vectors that include Ad5 capsid polynucleotides and chimeric fiber polynucleotides including an Ad35 fiber knob, the chimeric fiber polynucleotide typically also including an Ad35 fiber shaft (e.g., Ad5 fiber amino acids 1-44 in combination with Ad35 fiber amino acids 44-323). In various embodiments, the fiber includes an Ad35++ mutant fiber knob. In various Ad5/35 vectors of the present disclosure, all proteins except fiber knob domains and shaft were derived from serotype 5, while fiber knob domains and shafts were derived from serotype 35, and mutations that increased the affinity to CD46 were introduced into the Ad35 fiber knob (see WO 2010/120541 A2). Additionally, in various embodiments, the ITR and packaging sequence of the Ad5/35 vectors are derived from Ad5. (See Table 2 for exemplary knob mutations; and FIG. 22 for a general schematic of HDAd35 vector production.)

TABLE 2
Mutated Ad35 Knob increased binding to CD46

| | Kd (Oleks) | |
|---|---|---|
| A1: Asn217Asp Thr245Pro | A1 4.82 nM | Asp207Gly +++ |
| Ile256Leu* | | |
| A2: Asp207Gly Thr245Ala* | A2 0.629 nM | Thr245Ala ++ |
| A3: Asp207Gly Thr226Ala* | A3 1.407 nM | Ile256Leu + |
| A8: Ile192Val Ile256Val ? | A8 13.6850 nM | |
| B1: Asp207Gly* | B1 1.774 nM | |
| B2: wtAd35(207Asp) | B2 14.98 nM | |
| B3: Asn217Asp* | B3 16.85 nM | |
| B4: Thr245Ala* | B4 7.64 nM | |
| B5: Ile256Leu* | B5 10.96 nM | |
| B6: Ad3 | B6 no binding | |
| B7: Ad11 | B7 11.22 nM | |
| M1: Arg279Cys* | M1 no binding | |
| M3: Arg279His* | M3 no binding | |
| wtAd35* | 13.7 nM | |
| wtAd35* | 15.36 nM | |
| AA: Asp207Gly Thr245Ala | 0.943 nM | |
| Ile256Leu* | | |

*Published in Wang et al. (J. Virol., 82(21): 10567-10579, 2008)
**Published in Wang et al. (J. Virol. 81 (23): 12785-12792, 2007)

[0213] In general, the path from a natural adenoviral vector to a helper-dependent adenoviral vector can include three generations. First-generation adenoviral vectors are engineered to remove genes E1 and E3. Without these genes, adenoviral vectors cannot replicate on their own but can be produced in E1-expressing mammalian cell lines such as HEK293 cells. With only first-generation modifications, adenoviral vector cloning capacity is limited, and host immune response against the vector can be problematic for effective payload expression. Second-generation adenoviral vectors, in addition to E1/E3 removal, are engineered to remove non-structural genes E2 and E4, resulting in increased capacity and reduced immunogenicity. Third-generation adenoviral vector (also referred to as gutless, high capacity adenoviral vector, or helper-dependent adenoviral vector (HdAd)) are further engineered to remove all viral coding sequences, and retain only the ITRs of the genome and packaging sequence of the genome or a functional fragment thereof. Because these genomes do not encode the proteins necessary for viral production, they are helper-dependent: a helper-dependent genome can only be packaged into vector if they are present in a cell that includes a nucleic acid sequence that provides viral proteins in trans. These helper-dependent vectors are also characterized by still greater capacity and further decreased immunogenicity. Because the sequences of each viral genome are distinct at least for each serotype, the proper modifications required to produce a helper-dependent viral genome, and/or a helper genome, for a given serotype cannot be predicted from available information relating to other serotypes.

[0214] Helper-dependent adenoviral vectors (HDAd) engineered to lack all viral coding sequences can efficiently transduce a wide variety of cell types, and can mediate long-term transgene expression with negligible chronic toxicity. By deleting the viral coding sequences and leaving only the cis-acting elements necessary for genome replication (ITRs) and encapsidation (γ), cellular immune response against the Ad vector is reduced. HDAd vectors have a large cloning capacity of up to 37 kb, allowing for the delivery of large payloads. These payloads can include large therapeutic genes or even multiple transgenes and large regulatory components to enhance, prolong, and regulate transgene expression. Like other adenoviral vectors, typical HDAd genome generally remain episomal and do not integrate with a host genome (Rosewell et al., J Genet Syndr Gene Ther. Suppl 5:001, 2011, doi: 10.4172/2157-7412.s5-001).

[0215] In some HDAd vector systems, one viral genome (a helper genome) encodes all of the proteins required for replication but has a conditional defect in the packaging sequence, making it less likely to be packaged into a virion. As noted above, this can require identification of the packaging sequence or a functionally contributing (e.g., functionally required) fragment thereof and modification of the subject genome in a manner that does not negate propagation of the helper vector, which cannot be ascertained from existing knowledge relating to other adenoviral serotypes, A separate donor viral genome includes (e.g., only includes) viral ITRs, a payload (e.g., a therapeutic payload), and a functional packaging sequence (e.g., normal wild-type packaging sequence, or a functional fragment thereof), which allows this donor viral genome to be selectively packaged into HDAd viral vectors and isolated from the producer cells. HDAd donor vectors can be further purified from helper vectors by physical means. In general, some contamination of helper vectors and/or helper genomes in HDAd viral vectors and HDAd viral vector formulations can occur and can be tolerated.

[0216] In some HDAd vector systems, a helper genome utilizes a Cre/loxP system. In certain such HDAd vector systems, the HDAd donor genome includes 500 bp of noncoding adenoviral DNA that includes the adenoviral ITRs which are required for genome replication, and ψ which is the packaging sequence or a functional fragment thereof required for encapsidation of the genome into the capsid. It has also been observed that the HDAd donor vector genome can be most efficiently packaged when it has a total length of 27.7 kb to 37 kb, which length can be composed, e.g., of a therapeutic payload and/or a “stuffer” sequence. The HDAd donor genome can be delivered to cells, such as 293 cells (HEK293) that expresses Cre recombinase, optionally where the HDAd donor genome is delivered to the cells in a non-viral vector form, such as a bacterial plasmid form (e.g., where the HDAd donor genome is constructed as a bacterial plasmid (pHDAd) and is liberated by restriction enzyme digestion). The same cells can be transduced with the helper genome, which can include an E1-deleted Ad vector bearing a packaging sequence or functionally contributing (e.g., functionally required) fragment thereof flanked by loxP sites so that following infection of 293 cells expressing Cre recombinase, the packaging sequence or functionally contributing (e.g., functionally required) fragment thereof is excised from the helper genome by Cre-mediated site-specific recombination between the loxP sites. Thus, the HDAd donor genome can be transfected into 293 cells (HEK293) that express Cre and are transduced with a helper genome bearing a packaging sequence (γ) or a functional fragment thereof flanked by recombinase sites (e.g., loxP sites) such that excision mediated by a corresponding recombinase (e.g., Cre-mediated excision) of γ renders the helper virus genome unpackageable, but still able to provide all of the necessary trans-acting factors for propagation of the HDAd. After excision of the packaging sequence or functionally contributing (e.g., functionally required) fragment thereof, a helper genome is unpackageable but still able to undergo DNA replication and thus trans-complement the replication and encapsidation of the HDAd donor genome. In some embodiments, to prevent generation of replication competent Ad (RCA; E1+) as a consequence of homologous recombination between the helper and HDAd donor genomes present in 293 cells (HEK293) a “stuffer” sequence can be inserted into the E3 region to render any E1+ recombinants too large to be packaged. Similar HDAd production systems have been developed using FLP (e.g., FLPe)/frt site-specific recombination, where FLP-mediated recombination between frt sites flanking the packaging sequence of the helper genome selects against encapsidation of helper genomes in 293 cells (HEK293) that express FLP. Alternative strategies to select against the helper vectors have been developed. An Ad35 helper virus typically includes all of the viral genes except for those in E1, as E1 expression products can be supplied by complementary expression from the genome of a producer cell line.

[0217] HDAd5/35 donor vectors, donor genomes, helper vectors and helper genomes are exemplary of compositions provided herein and used in various methods of the present disclosure. An HDAd5/35 vector or genome is a helper-dependent chimeric Ad5/35 vector or genome with an Ad35 fiber knob and an Ad5 shaft. An HDAd5/35++ vector or genome is a helper-dependent chimeric Ad5/35 vector or genome with a mutant Ad35 fiber knob. The vector is mutated to increase the affinity to CD46, e.g., by 25-fold and increases cell transduction efficiency at lower multiplicity of infection (MOI) (Li & Lieber, FEBS Letters, 593(24): 3623-3648, 2019). An Ad5/35 helper vector is a vector that includes a helper genome that includes a conditionally expressed (e.g., frt-site or loxP-site flanked) packaging sequence and encodes all of the necessary trans-acting factors for production of Ad5/35 virions into which the donor genome can be packaged.

[0218] HDAd35 donor vectors, donor genomes, helper vectors and helper genomes are also exemplary of compositions provided herein and used in various methods of the present disclosure. Related application No. PCT/US2020/040756 is incorporated herein by reference in its entirety and with respect to adenoviral vectors, in particular with respect to Ad35 vectors, including HDAd35 vectors and related vectors. An HDAd35 vector or genome is a helper-dependent Ad35 vector or genome. An HDAd35++ vector or genome is a helper-dependent Ad35 vector or genome with a mutant Ad35 fiber knob which enhances its affinity to CD46 and increases cell transduction efficiency. An Ad35 helper vector is a vector that includes a helper genome that includes a conditionally expressed (e.g., frt-site or loxP-site flanked) packaging sequence and encodes all of the necessary trans-acting factors for production of Ad35 virions into which the donor genome can be packaged. The present disclosure further includes an HDAd35 donor vector production system including a cell including an HDAd35 donor genome and an Ad35 helper genome. In certain such cells, viral proteins encoded and expressed by the helper genome can be utilized in production of HDAd35 donor vectors in which the HDAd35 donor genome is packaged. Accordingly, the present disclosure includes methods of production of HDAd35 donor vectors by culturing cells that include an HDAd35 donor genome and an Ad35 helper genome. In some embodiments the cells encode and express a recombinase that corresponds to recombinase direct repeats that flank a packaging sequence of the Ad35 helper vector. In some embodiments, the flanked packaging sequence of the Ad35 helper genome has been excised.

[0219] In some embodiments the Ad35 helper genome encodes all Ad35 coding sequences. In some embodiments the Ad35 helper genome encodes and/or expresses all Ad35 coding sequences except for one or more coding sequences of the E1 region and/or an E3 coding sequence and/or an E4 coding sequence. In various embodiments, a helper genome that does not encode and/or express an Ad35 E1 gene does not encode and/or express an Ad35 E4 gene, optionally wherein the Ad35 helper genome is further engineered to include an Ad5 E4orf6 coding sequence. In various embodiments, as will be appreciate by those of skill in the art, cells of compositions and methods for production of HDAd 35 donor vectors can be cells that express an Ad5 E1 expression product. In various embodiments, as will be appreciate by those of skill in the art, cells of compositions and methods for production of HDAd 35 donor vectors can be 293 T cells (HEK293).

[0220] A helper may be engineered from wild-type or similarly propagation-competent vectors, such as a wild-type or propagation-competent Ad5 vector or Ad35 vector. As those of skill in the art will appreciate, one strategy that can be used in engineering of a helper vector is deletion or other functional disruption of E1 gene expression. The E1 region, located in the 5′ portion of adenoviral genomes, encodes proteins required for wild-type expression of the early and late genes. E1 deletion reduces or eliminates expression of certain viral genes controlled by E1, and E1-deleted helper viruses are replication-defective. Accordingly, E1-deficient helper virus can be propagated using cell lines that express E1. For example, where an E1-deficient Ad35 helper vector is engineered to encode an Ad5 E4orf6, the helper vector can be propagated in a cell line that expresses Ad5 E1, and where an E1-deficient Ad35 helper vector encodes an Ad5 E4orf6, the helper vector can be propagated in a cell line that expresses Ad5 E1. In one exemplary cell type for HDAd35 vector production, HEK293 cells express Ad5 E1b55k, which is known to form a complex with Ad5 E4 protein ORF6. Table 3 provides an example summary of expression products encoded by an Ad35 genome (see Gao, Gene Ther. 10:1941-1949, 2003).

TABLE 3
Predicated translational features of the Ad35 genome.

| | | |
|---|---|---|
| Features | From | To |

E1 and pIX regions

| | | | |
|---|---|---|---|
| E1A 261R | | 569 | 1148 |
| | Join | 1233 | 1441 |
| E1A 230R | | 569 | 1055 |
| | Join | 1233 | 1441 |
| E1A 58R | | 569 | 640 |
| | Join | 1233 | 1337 |
| E1B 214R (small T antigen) | | 1611 | 2153 |
| E1B 494R (large T antigen) | | 1916 | 3400 |
| pIX | | 3484 | 3903 |
| ORF-1 | | 2366 | 2689 |

E2 and IVa2 regions (complementary strand)

| | | | |
|---|---|---|---|
| IVa2 | | 5579 | 5590 |
| | Join | 3966 | 5300 |
| E2B DNA pol | | 5069 | 8437 |
| E2B pTP | | 8440 | 10356 |
| E2A DBF | | 22414 | 23415 |
| ORF-2 | | 5988 | 6482 |
| ORF-3 | | 7847 | 8257 |
| ORF-4 | | 15663 | 15971 |
| ORF-5 | | 15743 | 16216 |
| ORF-6 | | 16457 | 17041 |
| ORF-7 | | 17543 | 17938 |
| ORR-8 | | 17994 | 18713 |
| ORF-9 | | 21858 | 22436 |
| ORF-10 | | 22128 | 22502 |
| ORF-11 | | 23027 | 23488 |

E3 region

| | | |
|---|---|---|
| E3 12.2K protein | 27198 | 27515 |
| E3 15.0K protein | 27469 | 27864 |
| E3 18.5K protein | 27849 | 28349 |
| E3 20.3K protein | 28369 | 28914 |
| E3 20.6K protein | 28932 | 29495 |
| E3 15.2K protein | 29817 | 30221 |
| E3 15.3K protein | 30214 | 30621 |
| ORF-12 | 25693 | 26019 |
| ORF-13 | 27908 | 28240 |

E4 region (complementary strand)

| | | |
|---|---|---|
| E4 299R | 32075 | 32974 |
| E4 145R | 33604 | 34041 |
| E4 125R | 34038 | 34415 |
| E4 117R | 33254 | 33607 |
| E4 122R | 32877 | 33245 |
| ORF-14 | 33100 | 33609 |
| VA RNA region | 10433 | 10594 |

L region

| | | | |
|---|---|---|---|
| L1 52, 55K | | 10653 | 11819 |
| L1 IIIa | | 11845 | 13608 |
| L2 III (penton base) | | 13690 | 15375 |
| L2 pVII | | 15383 | 15961 |
| L2 V | | 16004 | 17059 |
| L3 pVI | | 17399 | 18139 |
| L3 II (hexon) | | 18255 | 21113 |
| L3 23K (protease) | | 21150 | 21779 |
| L4 100K | | 23446 | 25884 |
| L4 22K | | 25616 | 26191 |
| L4 33K | | 25616 | 25934 |
| | Join | 26104 | 26465 |
| L4 pVIII | | 26515 | 27198 |
| L5 IV(fiber) | | 30826 | 31797 |

[0221] The present disclosure includes, among other things, HDAd35 donor vectors and genomes that include Ad35 ITRs (e.g., a 5′ Ad35 ITR and a 3′ ITR), e.g., where two Ad35 ITRs flank a payload. The present disclosure includes, among other things, HDAd35 donor vectors and genomes that include an Ad35 packaging sequence or a functional fragment thereof. The present disclosure includes, among other things, HDAd35 donor vectors and genomes in which E1 or a fragment thereof is deleted (e.g., where the E1 deletion includes deletion of nucleotides 481-3112 of GenBank Accession No. AX049983 or corresponding positions of another Ad35 vector sequence provided herein). The present disclosure includes, among other things, HDAd35 vectors and genomes in which E3 or a fragment thereof is deleted (e.g., where the E3 deletion includes deletion of nucleotides 27609 to 30402 or 27435-30542 of GenBank Accession No. AX049983 or corresponding positions of another Ad35 vector sequence provided herein).

[0222] The present disclosure includes, among other things, Ad35 helper vectors and genomes that include two recombination site elements that flank a packaging sequence or functionally contributing (e.g., functionally required) fragment thereof, each recombination site element including a recombination site, where the two recombination sites are sites for the same recombinase. Construction of an Ad35 helper vector, as noted above, cannot be predictably engineered from existing knowledge relating to other vectors. To the contrary, relevant sequences of Ad35 are very different from, e.g., corresponding sequences of Ad5 (compare, e.g., the 5′ 600 to 620 nucleotides of Ad35 and Ad5). Moreover, packaging sequence are serotype-specific. The Ad35 packaging sequence includes sequences that correspond to at least Ad5 packaging single sequences AI, AII, AIII, AIV, and AV. Accordingly, production of an Ad35 helper vector requires several unpredictable determinations, including (1) identification of the Ad35 packaging sequence or functionally contributing (e.g., functionally required) fragment thereof to be flanked by recombinase sites (e.g., loxP sites) by insertion of recombinase site elements into the subject genome, which is not straightforward where sequence similarity is limited; (2) identification of recombinase site element insertions that do not negate propagation of the helper vector (under conditions where the packaging sequence or functionally contributing (e.g., functionally required) fragment thereof is not excised), which cannot be predicted; and/or (3) identification of spacing between the recombination site elements that permits efficient deletion of the packaging sequence or functionally contributing (e.g., functionally required) fragment thereof while reducing helper virus packaging during production of HDAd35 donor vectors (e.g., in a cre recombinase-expressing cell line such as the 116 cell line).

[0223] The present disclosure includes a plurality of exemplary Ad35 helper vectors and genomes that (1) include loxP sites flanking a functionally contributing or functionally required fragment of the Ad35 packaging sequence, at least in that recombination of the loxP sites causing excision of the flanked sequence reduces propagation of the vector by, e.g., at least 20%, 30%, 40%, 50%, 60%, 70%, 80%, 90%, 91%, 92%, 93%, 94%, 95%, 96%, 97%, 98%, 99%, or 100% (e.g., reduces propagation of the vector by a percentage having a lower bound of 20%, 30%, 40%, 50%, 60%, 70%, and an upper bound of 60%, 70%, 80%, 90%, 91%, 92%, 93%, 94%, 95%, 96%, 97%, 98%, 99%, or 100%), optionally where percent propagation is measured as the number of viral particles produced by propagation of excised vector (recombinase site-flanked sequence excised) as compared to complete vector (recombinase site-flanked sequence not excised) or wild-type Ad35 vector under comparable conditions.

[0224] In at least one exemplary Ad35 helper vector, a recombinase site element (e.g., a loxP element) is inserted after nucleotide 178 and a recombinase site element (e.g., a loxP element) is inserted after nucleotide 437. Excision of the loxP-flanked sequence removes packaging sequence sequences A1 to AIV. In certain such embodiments, deletion of nucleotides 345-3113 removes the E1 gene as well as packaging single sequences AVI and AVII. Accordingly, the flanked packaging sequence or fragment thereof corresponds to positions 179-344. Vectors according to this description were shown to propagate.

[0225] In at least one exemplary Ad35 helper vector, a recombinase site element (e.g., a loxP element) is inserted after nucleotide 178 and a recombinase site element (e.g., a loxP element) is inserted after nucleotide 481, where nucleotides 179-365 are deleted (removing packaging sequence sequences A1 to AV, such that remaining sequences AVI and AVII are in the nucleic acid sequence flanked by the recombinase site elements. In certain such embodiments, deletion of nucleotides 482-3113 removes the E1 gene. Accordingly, the flanked packaging sequence or fragment thereof corresponds to positions 366-481. Vectors according to this description were shown to propagate.

[0226] In at least one exemplary Ad35 helper vector, a recombinase site element (e.g., a loxP element) is inserted after nucleotide 154 and a recombinase site element (e.g., a loxP element) is inserted after nucleotide 481, In certain such embodiments, deletion of nucleotides 482-3113 removes the E1 gene. Accordingly, the flanked packaging sequence or fragment thereof corresponds to positions 155-481. Vectors according to this description were shown to propagate.

[0227] In at least one exemplary Ad35 helper vector, a recombinase site element (e.g., a loxP element) is inserted after nucleotide 158 and a recombinase site element (e.g., a loxP element) is inserted after nucleotide 480. Vectors according to this description were shown to propagate. In certain such embodiments, nucleotides 27388-30402 including E3 region are deleted. In certain embodiments, the vector is an Ad35⁺⁺ vector.

[0228] In at least one exemplary Ad35 helper vector, a recombinase site element (e.g., a loxP element) is inserted after nucleotide 158 and a recombinase site element (e.g., a loxP element) is inserted after nucleotide 446. Vectors according to this description were shown to propagate. In certain such embodiments, nucleotides 27388-30402 including E3 region are deleted. In certain embodiments, the vector is an Ad35⁺⁺ vector.

[0229] In at least one exemplary Ad35 helper vector, a recombinase site element (e.g., a loxP element) is inserted after nucleotide 179 and a recombinase site element (e.g., a loxP element) is inserted after nucleotide 480. Vectors according to this description were shown to propagate. In certain such embodiments, nucleotides 27388-30402 including E3 region are deleted. In certain embodiments, the vector is an Ad35⁺⁺ vector.

[0230] In at least one exemplary Ad35 helper vector, a recombinase site element (e.g., a loxP element) is inserted after nucleotide 206 and a recombinase site element (e.g., a loxP element) is inserted after nucleotide 480. Vectors according to this description were shown to propagate. In certain such embodiments, nucleotides 27,388-30,402 including E3 region are deleted. In certain embodiments, nucleotides 27,607-30,409 or 27,609-30,402 are deleted. In certain embodiments, nucleotides 27,240-27,608 are not deleted.

[0231] In at least one exemplary Ad35 helper vector, a recombinase site element (e.g., a loxP element) is inserted after nucleotide 139 and a recombinase site element (e.g., a loxP element) is inserted after nucleotide 446. In certain such embodiments, nucleotides 27609-30402 are deleted.

[0232] In at least one exemplary Ad35 helper vector, a recombinase site element (e.g., a loxP element) is inserted after nucleotide 158 and a recombinase site element (e.g., a loxP element) is inserted after nucleotide 446. In certain such embodiments, nucleotides 27609-30402 are deleted.

[0233] In at least one exemplary Ad35 helper vector, a recombinase site element (e.g., a loxP element) is inserted after nucleotide 179 and a recombinase site element (e.g., a loxP element) is inserted after nucleotide 446. In certain such embodiments, nucleotides 27609-30402 are deleted.

[0234] In at least one exemplary Ad35 helper vector, a recombinase site element (e.g., a loxP element) is inserted after nucleotide 201 and a recombinase site element (e.g., a loxP element) is inserted after nucleotide 446. In certain such embodiments, nucleotides 27609-30402 are deleted.

[0235] In at least one exemplary Ad35 helper vector, a recombinase site element (e.g., a loxP element) is inserted after nucleotide 158 and a recombinase site element (e.g., a loxP element) is inserted after nucleotide 481. In certain such embodiments, nucleotides 27609-30402 are deleted.

[0236] In at least one exemplary Ad35 helper vector, a recombinase site element (e.g., a loxP element) is inserted after nucleotide 179 and a recombinase site element (e.g., a loxP element) is inserted after nucleotide 384. In certain such embodiments, nucleotides 27609-30402 are deleted.

[0237] In at least one exemplary Ad35 helper vector, a recombinase site element (e.g., a loxP element) is inserted after nucleotide 179 and a recombinase site element (e.g., a loxP element) is inserted after nucleotide 481. In certain such embodiments, nucleotides 27609-30402 are deleted.

[0238] In at least one exemplary Ad35 helper vector, a recombinase site element (e.g., a loxP element) is inserted after nucleotide 206 and a recombinase site element (e.g., a loxP element) is inserted after nucleotide 481. In certain such embodiments, nucleotides 27609-30402 are deleted.

[0239] In various embodiments, at least portion of an Ad35 packaging sequence flanked by recombinase DRs corresponds to: nucleotides 179-344; nucleotides 366-481; nucleotides 155-481; nucleotides 159-480; nucleotides 159-446; nucleotides 180-480; nucleotides 207-480; nucleotides 140-446; nucleotides 159-446; nucleotides 180-446; nucleotides 202-446; nucleotides 159-481; nucleotides 180-384; nucleotides 180-481; or nucleotides 207-481 of the Ad35 sequence according to GenBank Accession No. AX049983. In various embodiments, at least a portion of an Ad35 packaging sequence flanked by recombinase DRs corresponds to nucleotides 138-481 of the Ad35 sequence according to GenBank Accession No. AX049983. In various embodiments, an Ad35 genome includes recombinase direct repeats (DRs) within 550 nucleotides of the 5′ end of the Ad35 genome that functionally disrupt the Ad35 packaging signal but not the 5′ Ad35 inverted terminal repeat (ITR). In various embodiments, recombinase DRs are LoxP sites. In various embodiments, recombinase DRs are rox, vox, AttB, or AttP sites. In various embodiments, an Ad35 helper genome includes Ad5 E4orf6 for amplification in 293 T cells.

[0240] An additional optional engineering consideration can be engineering of a helper genome having a size that permits separation of helper vector from HDAd35 donor vector by centrifugation, e.g., by CsCl ultracentrifugation. One means of achieving this result is to increase the size of the helper genome as compared to a typical Ad35 genome, which has a wild-type length of 34,794 bp. In particular, adenoviral genomes can be increased by engineering to at least 104% of wild-type length. Certain helper vectors of the present disclosure include the Ad35 E1 region and E4 region, delete the E3 region, and can accommodate a payload and/or stutter sequence.

[0241] Ad35 helper vectors can be used for production of Ad35 donor vectors. Production of HDAd35++ vectors can include co-transfection of a plasmid containing the HDAd vector genome and a packaging-defective helper virus that provides structural and non-structural viral proteins. The helper virus genome can rescue propagation of the Ad35 donor vector and Ad35 donor vector can be produced, e.g., at a large scale, and isolated. Various protocols are known in the art, e.g., at Palmer et al., 2009 Gene Therapy Protocols. Methods in Molecular Biology, Volume 433. Humana Press; Totowa, N.J.: 2009. pp. 33-53.

[0242] The present disclosure includes exemplary data demonstrating that HDAd35 donor vectors of the present disclosure perform comparably to HDAd5/35 donor vectors in transduction of human CD34+ cells, as measured by percent of contacted cells expressing a payload coding sequence encoding GFP. Results were confirmed at multiple MOIs ranging from 500 to 2000 vector particles per contacted cell. Exemplary experiments were conducted using HDAd35 donor vectors were produced using an Ad35 helper vector as disclosed above, where loxP sites flanked nucleotides 366-481 (see, e.g., FIG. 27).

[0243] Various exemplary donor vectors are provided herein. The present disclosure provides, as non-limiting examples, HDAd35 donor genomes as set forth in Tables 4-7.

TABLE 4
Exemplary HDAd35 donor vector according to SEQ ID NO: 189.

| | Position in |
|---|---|
| Sequence Feature | SEQ ID NO: 189 |
| Ad35 5′ (including ITR, Packaging Sequence) | Start: 1 End: 481 |
| FRT recombinase direct repeat | Start: 14126 End: 14159 |
| | (Complementary) |
| pT4 transposase inverted repeat | Start: 14220 End: 14463 |
| EF1α promoter | Start: 14491 End: 15825 |
| mgmt^{P140K} selection cassette | Start: 15843 End: 16466 |
| polyA sequence | Start: 16484 End: 16705 |
| pT4 transposase inverted repeat | Start: 16735 End: 17000 |
| FRT recombinase direct repeat | Start: 17107 End: 17140 |
| | (Complementary) |
| Ad35 3′ (including ITR) | Start: 28823 End: 29230 |

TABLE 5
Exemplary HDAd35 donor vector according to SEQ ID NO: 190

| | Position in SEQ |
|---|---|
| Sequence Feature | ID NO: 190 |
| Ad35 5′ (including ITR, Packaging Sequence) | Start: 1 End: 481 |
| FRT recombinase direct repeat | Start: 14126 End: 14159 |
| | (Complementary) |
| pT4 transposase inverted repeat | Start: 14220 End: 14463 |
| EF1α promoter | Start: 14478 End: 15812 |
| mgmt^{P140K} selection cassette | Start: 15830 End: 16450 |
| 2A peptide-encoding sequence | Start: 16451 End: 16522 |
| GFP-encoding sequence | Start: 16523 End: 17242 |
| SV40 polyA sequence | Start: 17269 End: 17390 |
| pT4 transposase inverted repeat | Start: 17501 End: 17766 |
| FRT recombinase direct repeat | Start: 17873 End: 17906 |
| | (Complementary) |
| Ad35 3′ (including ITR) | Start: 29589 End: 29996 |

TABLE 6
Exemplary HDAd35 donor vector according to SEQ ID NO: 191.

| | Position in |
|---|---|
| Sequence Feature | SEQ ID NO: 191 |
| Ad35 5′ (including ITR, Packaging Sequence) | Start: 1 End: 481 |
| FRT recombinase direct repeat | Start: 14126 End: 14159 |
| | (Complementary) |
| pT4 transposase inverted repeat | Start: 14220 End: 14463 |
| EF1α promoter | Start: 14478 End: 15812 |
| mgmt^{P140K} selection cassette | Start: 15830 End: 16450 |
| 2A peptide-encoding sequence | Start: 16451 End: 16522 |
| mCherry-encoding sequence | Start: 16526 End: 17230 |
| SV40 polyA sequence | Start: 17259 End: 17380 |
| pT4 transposase inverted repeat | Start: 17491 End: 17756 |
| FRT recombinase direct repeat | Start: 17863 End: 17896 |
| | (Complementary) |
| Ad35 3′ (including ITR) | Start: 29579 End: 29986 |

TABLE 7
Exemplary support vector according to SEQ ID NO: 192.

| | Position in |
|---|---|
| Sequence Feature | SEQ ID NO: 192 |
| Ad35 5′ (including ITR, Packaging Sequence) | Start: 1 End: 481 |
| PGK promoter | Start: 14103 End: 14614 |
| SB100x transposase-encoding sequence | Start: 14763 End: 15785 |
| BGH polyA sequence | Start: 15811 End: 16128 |
| B-globin polyA sequence | Start: 16088 End: 16376 |
| | (Complementary) |
| Flpe recombinase-encoding sequence | Start: 16488 End: 17759 |
| | (Complementary) |
| EF1α promoter | Start: 17780 End: 18895 |
| | (Complementary) |
| Ad35 3′ (including ITR) | Start: 29751 End: 30158 |

TABLE 8
Exemplary Ad35 helper vector according to SEQ ID NO: 180

| | Position in |
|---|---|
| Sequence Feature | SEQ ID NO: 180 |
| Ad35 5′ (including ITR)(Ad35 nt 1-178) | Start: 2582 End: 2759 |
| LoxP recombinase site | Start: 2768 End: 2801 |
| Ad35 packaging sequence (Ad35 nt 179-344) | Start: 2808 End: 2973 |
| LoxP recombinase site | Start: 2974 End: 3007 |
| Ad35 sequence (Ad35 nt 3112-27435) | Start: 3016 End: 27338 |
| Lambda-1 sequence | Start: 27393 End: 29862 |
| | (Complementary) |
| BGH polyA sequence | Start: 30176 End: 30390 |
| CopGFP-encoding sequence | Start: 30415 End: 31080 |
| | (Complementary) |
| CMV promoter | Start: 31127 End: 31779 |
| | (Complementary) |
| Lambda-2 sequence | Start: 31831 End: 33360 |
| Ad35 sequence (Ad35 nt 30544-31879) | Start: 33421 End: 34756 |
| Ad5 E4orf6 sequence | Start: 34752 End: 35866 |
| Ad35 3′ (including ITR) | Start: 35864 End: 37686 |
| (Ad35 nt 32972-34794) | |

TABLE 9
Exemplary Ad35 helper vector according to SEQ ID NO: 172.

| | Position in |
|---|---|
| Sequence Feature | SEQ ID NO: 172 |
| Ad35 5′ (including ITR) (Ad35 nt 1-178) | Start: 2582 End: 2759 |
| LoxP recombinase site | Start: 2768 End: 2801 |
| Ad35 packaging sequence (Ad35 nt 366-481) | Start: 2808 End: 2923 |
| LoxP recombinase site | Start: 2924 End: 2957 |
| Ad35 sequence (Ad35 nt 3112-2743) | Start: 2966 End: 27288 |
| Lambda-1 sequence | Start: 27343 End: 29812 |
| | (Complementary) |
| BGH polyA sequence | Start: 30126 End: 30340 |
| CopGFP-encoding sequence | Start: 30365 End: 31030 |
| | (Complementary) |
| CMV promoter | Start: 31077 End: 31729 |
| | (Complementary) |
| Lambda-2 sequence | Start: 31781 End: 33310 |
| Ad35 sequence (Ad35 nt 30544-31879) | Start: 33371 End: 34706 |
| Ad5 E4orf6 sequence | Start: 34702 End: 35816 |
| Ad35 3′ (including ITR) | Start: 35814 End: 37636 |
| (Ad35 nt 32972-34794) | |

TABLE 10
Exemplary Ad35 helper vector according to SEQ ID NO: 173.

| | Position in |
|---|---|
| Sequence Feature | SEQ ID NO: 173 |
| Ad35 5′ (including ITR) (Ad35 nt 1-154) | Start: 2582 End: 2735 |
| LoxP recombinase site | Start: 2744 End: 2777 |
| Ad35 packaging sequence (Ad35 nt 155-481) | Start: 2784 End: 3110 |
| LoxP recombinase site | Start: 3111 End: 3144 |
| Ad35 sequence (Ad35 nt 3112-27435) | Start: 3153 End: 27475 |
| Lambda-1 sequence | Start: 27530 End: 29999 |
| | (Complementary) |
| BGH polyA sequence | Start: 30313 End: 30527 |
| CopGFP-encoding sequence | Start: 30552 End: 31217 |
| | (Complementary) |
| CMV promoter | Start: 31264 End: 31916 |
| | (Complementary) |
| Lambda-2 sequence | Start: 31968 End: 33497 |
| Ad35 sequence (Ad35 nt 30544-31879) | Start: 33558 End: 34893 |
| Ad5 E4orf6 sequence | Start: 34889 End: 36003 |
| Ad35 3′ (including ITR) | Start: 36001 End: 37823 |
| (Ad35 nt 32972-34794) | |

[0244] This present disclosure includes production and use of Ad35 vectors and demonstration of efficacy for transduction of CD34+ cells. Three exemplary Ad35 vectors were produced, with different structures (including different LoxP placement).

[0245] The left end of a representative Ad5/35 helper virus genome is shown in FIG. 23 (SEQ ID NO: 186). The sequences shaded in dark grey correspond to the native Ad5 sequence, i.e., the unshaded or light grey highlighted sequences were artificially introduced. The sequences highlighted in light grey are two copies of the (tandemly repeated) loxP sequences. In the presence of “cre recombinase” protein, the nucleotide sequence between the two loxP sequences are deleted (leaving behind one copy of loxP). Because the Ad5 sequence between the loxP sites is essential for packaging the adenoviral DNA into capsids (in the nucleus of the producer cell), this deletion renders the helper adenovirus genome DNA deficient for packaging. Consequently, the efficiency of the deletion process has a direct influence of the level of packaged helper genomic DNA (the undesired helper virus “contamination”). In view of the above, in order to translate the same scheme to adenovirus serotypes other than Ad5, it is desirable to achieve the following: 1. Identify the sequences that are essential for packaging, so that they can be flanked by loxP sequence insertions and deleted in the presence of cre recombinase. Identification of these sequences is not straightforward if there is little similarity in sequences. 2. Determine where in the native DNA sequence the insertion of loxP sequence would have the least effect for the propagation and packaging of helper virus (in the absence of cre recombinase). 3. Determine the spacing between the loxP sequences to allow for efficient deletion of packaging sequences and keeping helper virus packaging to a minimum during the production of helper-dependent adenovirus (i.e., in a cre recombinase—expressing cell line such as the 116 cell line).

[0246] FIG. 24 shows an alignment of representative Ad5 and Ad35 packaging signals (SEQ ID NOs: 187 and 188). The alignment of the left end sequences of Ad5 with Ad35 help in identifying packaging signals. Motifs in the Ad5 sequence that are important for packaging (AI through AV) are indicated with lines (see also FIG. 1B of Schmid et al., J Virol., 71(5):3375-4, 1997). The location of exemplary loxP insertion sites are indicated by black arrows. These insertions flank AI to AIV and disrupt AV. The additional packaging signal AVI and AVII, as indicated in Schmid et al., have been deleted in the Ad5 helper virus as part of the E1 deletion of this vector.

[0247] FIG. 25 is a schematic illustration of the Ad35 vector pAd35GLN-5E4. This is a first-generation (E1/E3-deleted) Ad35 vector derived from a vectorized Ad35 genome (Holden strain from the ATCC) using a recombineering technique (Zhang et al., Cell Rep. 19(8):1698-17-9, 2017). This vector plasmid was then used to insert loxP sites.

[0248] The packaging site (PS)1 LoxP insertion sites are after nucleotide 178 and 344; this Ad35 vector is exemplified in SEQ ID NO: 180. This LoxP placement is expected to remove AI to AIV. The rest of the packaging signal including AVI and AVII (after 344) has been deleted (as part of the E1 deletion at positions 345 to 3113). The PS2 LoxP insertion sites are after nucleotide 178 and 481; this Ad35 vector is exemplified in SEQ ID NO: 172. Additionally, nucleotides 179 to 365 have been deleted, so AI through AV are not present. The remaining packaging motifs AVI and AVII are removable by cre recombinase during HDAd production. The E1 deletion is from 482 to 3113. The PS3 LoxP insertion sites are after nucleotide 154 and 481; this Ad35 vector is exemplified in SEQ ID NO: 173. The packaging signal structure of these three vectors is provided in FIG. 26.

[0249] Three engineered vectors could be rescued. The percentage of viral genomes with rearranged loxP sites was 50, 20, and 60% for PS1, PS2, and PS3, respectively. Rearrangements occur when the lox P sites critically affected viral replication and gene expression.

[0250] This HDAd35 platform compared to a current HDAd5/35 platform is illustrated in FIG. 27. Both vectors contain a CMV-GFP cassette. The Ad35 vector does not contain immunogenic Ad5 capsid protein. These two vectors showed comparable transduction efficiency of CD34+ cells in vitro. Bridging study shows comparable transduction efficiency of CD34+ cells in vitro. Human HSCs, peripheral CD34+ cells from G-CSF mobilized donors were transduced with HDAd35 (produced with Ad35 helper P-2) or a chimeric vector containing the Ad5 capsid with fiber from Ad35, at MOIs 500, 1000, 2000 vp/cell. The percentage of GFP-positive cells was measured 48 hours after adding the virus in three independent experiments.

[0251] The PS2 helper vector was remade (as illustrated in FIG. 28) for use in monkey studies. The following actions were taken to make this version: deletion of E1 region, a mutant packaging signal flanked by Loxp, mutant packaging sequence, deletion of E3 region (27435→30540), replace with Ad5E4orf6, insertion of stutter DNA flanking copGFP cassette, and introduction of mutation in the knob to make Ad35K++.

[0252] FIG. 29 shows a mutated packaging signal sequence. Residues 1 through 137 are the Ad35 ITR. Text in bold are SwaI sites, the Loxp site is italicized, and the mutated packaging signal is underlined. For clarity, these sequences are shown individually in FIG. 29.

[0253] Four Ad35 helper vector packaging signal variants were made (FIG. 30A). The E3 region (27388→30402) was deleted and the CMV-eGFP cassette was located within an E3 deletion, Ad35K++, and eGFP was used instead of copGFP. The LoxP sites in these four packaging signal variants are at the illustrated positions (FIG. 120A). All four helper vectors could be rescued.

[0254] FIG. 30B is a schematic representation of eight additional packaging signal variants, with the specified the LoxP sites.

[0255] In certain additional helper vector and packaging signal variants, changes were made to the helper vector in FIG. 30A, such as shortening the E3 deletion (27609→30402). Further description of adenoviral vectors is found in related application No. PCT/US2020/040756, which is incorporated herein by reference in its entirety and with respect to adenoviral vectors, in particular with respect to Ad35 vectors, including HDAd35 vectors and related vectors.

[0256] Vectors described herein can be administered in coordination with HSC mobilization factors. In certain embodiments, adenoviral vector formulations described herein can be administered in concert with HSC mobilization. In particular embodiments, administration of viral vector occurs concurrently with administration of one or more mobilization factors (also referred to herein in the alternative as mobilization agents). In particular embodiments, administration of viral vector follows administration of one or more mobilization factors. In particular embodiments, administration of viral vector follows administration of a first one or more mobilization factors and occurs concurrently with administration of a second one or more mobilization factors.

[0257] Mobilizing agents include cytotoxic drugs, cytokines, and/or small molecules. Agents for HSPC mobilization include, for example, granulocyte-colony stimulating factor (G-CSF), granulocyte macrophage colony stimulating factor (GM-CSF), plerixafor, SCF, S-CSF, a CXCR4 antagonist, a CXCR2 agonist, and Gro-Beta (GRO-ρ). In various embodiments, a CXCR4 antagonist is AMD3100 and/or a CXCR2 agonist is GRO-β. In particular embodiments, a mobilizing agent is C4, a CXC chemokine ligand for the CXCR2 receptor.

[0258] Plerixafor is a bicyclam molecule that specifically and reversibly blocks SDF-1 binding to CXCR4. Plerixafor is also known commercially under the trade names Mozobil, Revixil, UMK121, AMD3000, AMD3100, GZ316455, JM3100, and SDZSID791. In certain embodiments, plerixafor is used as a single agent for mobilization of HSPCs.

[0259] Gro-Beta rapidly mobilizes short- and long-term repopulating cells in mice and/or monkeys and synergistically enhances mobilization responses with G-CSF (Pelus and Fukuda, Exp. Hematol. 34(8):1010-1020, 2006). Furthermore, Gro-Beta can be combined with antagonists of VLA4 to synergistically increase circulating HSPC numbers (Karpova et al., Blood. 129(21):2939-2949, 2017). In various embodiments, the present disclosure includes a Gro-Beta agent as disclosed in WO 2019/089833 (e.g., Gro-Beta, Gro-BetaT, and a variant thereof), WO 2019/113375, and/or WO 2019/136159, each of which is incorporated herein by reference in its entirety and in particular with respect to sequences relating to Gro-Beta and modified forms thereof. In various embodiments, the present disclosure includes a Gro-Beta agent that is MGTA 145 (Magenta Therapeutics). In various embodiments, the present disclosure includes a Gro-Beta agent form that does not include amino acids corresponding to the four N-terminal amino acids of canonical Gro-Beta.

[0260] G-CSF is a cytokine whose functions in HSPC mobilization can include the promotion of granulocyte expansion and both protease-dependent and independent attenuation of adhesion molecules and disruption of the SDF-1/CXCR4 axis. In particular embodiments, any commercially available form of G-CSF known to one of ordinary skill in the art can be used in the methods and formulations as disclosed herein, for example, Filgrastim (Neupogen®, Amgen Inc., Thousand Oaks, Calif.) and PEGylated Filgrastim (Pegfilgrastim, NEULASTA®, Amgen Inc., Thousand Oaks, Calif.).

[0261] GM-CSF is a monomeric glycoprotein also known as colony-stimulating factor 2 (CSF2) that functions as a cytokine and is naturally secreted by macrophages, T cells, mast cells, natural killer cells, endothelial cells, and fibroblasts. In particular embodiments, any commercially available form of GM-CSF known to one of ordinary skill in the art can be used in the methods and formulations as disclosed herein, for example, Sargramostim (Leukine, Bayer Healthcare Pharmaceuticals, Seattle, Wash.) and molgramostim (Schering-Plough, Kenilworth, N.J.).

[0262] AMD3100 (MOZOBIL™, PLERIXAFOR™; Sanofi-Aventis, Paris, France), a synthetic organic molecule of the bicyclam class, is a chemokine receptor antagonist and reversibly inhibits SDF-1 binding to CXCR4, promoting HSPC mobilization. AMD3100 is approved to be used in combination with G-CSF for HSPC mobilization in patients with myeloma and lymphoma. The structure of AMD3100 is:

[chemical structure]

[0263] SCF, also known as KIT ligand, KL, or steel factor, is a cytokine that binds to the c-kit receptor (CD117). SCF can exist both as a transmembrane protein and a soluble protein. This cytokine plays an important role in hematopoiesis, spermatogenesis, and melanogenesis. In particular embodiments, any commercially available form of SCF known to one of ordinary skill in the art can be used in the methods and formulations as disclosed herein, for example, recombinant human SCF (Ancestim, STEMGEN®, Amgen Inc., Thousand Oaks, Calif.).

[0264] Chemotherapy used in intensive myelosuppressive treatments also mobilizes HSPCs to the peripheral blood as a result of compensatory neutrophil production following chemotherapy-induced aplasia. In particular embodiments, chemotherapeutic agents that can be used for mobilization of HSPCs include cyclophosphamide, etoposide, ifosfamide, cisplatin, and cytarabine.

[0265] Additional agents that can be used for cell mobilization include: CXCL12/CXCR4 modulators (e.g., CXCR4 antagonists: POL6326 (Polyphor, Allschwil, Switzerland), a synthetic cyclic peptide which reversibly inhibits CXCR4; BKT-140 (4F-benzoyl-TN14003; Biokine Therapeutics, Rehovit, Israel); TG-0054 (Taigen Biotechnology, Taipei, Taiwan); CXCL12 neutralizer NOX-A12 (NOXXON Pharma, Berlin, Germany) which binds to SDF-1, inhibiting its binding to CXCR4); Sphingosine-1-phosphate (S1 P) agonists (e.g., SEW2871, Juarez et al. Blood 119: 707-716, 2012); vascular cell adhesion molecule-1 (VCAM) or very late antigen 4 (VLA-4) inhibitors (e.g., Natalizumab, a recombinant humanized monoclonal antibody against a4 subunit of VLA-4 (Zohren et al. Blood 111: 3893-3895, 2008); B105192, a small molecule inhibitor of VLA-4 (Ramirez et al. Blood 114: 1340-1343, 2009)); parathyroid hormone (Brunner et al. Exp Hematol. 36: 1157-1166, 2008); proteasome inhibitors (e.g., Bortezomib, Ghobadi et al. ASH Annual Meeting Abstracts. p. 583, 2012); Groβ, a member of CXC chemokine family which stimulates chemotaxis and activation of neutrophils by binding to the CXCR2 receptor (e.g., SB-251353, King et al. Blood 97: 1534-1542, 2001); stabilization of hypoxia inducible factor (HIF) (e.g., FG-4497, Forristal et al. ASH Annual Meeting Abstracts. p. 216, 2012); Firategrast, an α4β1 and α4β7 integrin inhibitor (α4β1/7) (Kim et al. Blood 128: 2457-2461, 2016); Vedolizumab, a humanized monoclonal antibody against the a487 integrin (Rosario et al. Clin Drug Investig 36: 913-923, 2016); and BOP (N-(benzenesulfonyl)-L-prolyl-L-O-(1-pyrrolidinylcarbonyl) tyrosine) which targets integrins α9β1/α4β1 (Cao et al. Nat Commun 7: 11007, 2016). Additional agents that can be used for HSPC mobilization are described in, for example, Richter R et al. Transfus Med Hemother 44:151-164, 2017, Bendall & Bradstock, Cytokine & Growth Factor Reviews 25: 355-367, 2014, WO 2003043651, WO 2005017160, WO 2011069336, U.S. Pat. Nos. 5,637,323, 7,288,521, 9,782,429, US 2002/0142462, and US 2010/02268.

[0266] In various embodiments, a mobilization regimen includes two or more mobilization agents. A historically used mobilization regimen includes a combination of cyclophosphamide (Cy) plus granulocyte-colony stimulating factor (G-CSF) (Bonig et al., Stem Cells. 27(4):836-837, 2009). Additional mobilizing agent regimens can include alpha4-integrin blockade with anti-functional antibodies and CXCR4 blockade with the small-molecule inhibitor plerixafor. Another mobilization regimen includes the combined regimen of GM-CSF or G-CSF with plerixafor.

[0267] In particular embodiments, a therapeutically effective amount of G-CSF includes 0.1 μg/kg to 100 μg/kg. In particular embodiments, a therapeutically effective amount of G-CSF includes 0.5 μg/kg to 50 μg/kg. In particular embodiments, a therapeutically effective amount of G-CSF includes 0.5 μg/kg, 1 μg/kg, 2 μg/kg, 3 μg/kg, 4 μg/kg, 5 μg/kg, 6 μg/kg, 7 μg/kg, 8 μg/kg, 9 μg/kg, 10 μg/kg, 11 μg/kg, 12 μg/kg, 13 μg/kg, 14 μg/kg, 15 μg/kg, 16 μg/kg, 17 μg/kg, 18 μg/kg, 19 μg/kg, 20 μg/kg, or more. In particular embodiments, a therapeutically effective amount of G-CSF includes 5 μg/kg. In particular embodiments, G-CSF can be administered subcutaneously or intravenously. In particular embodiments, G-CSF can be administered for 1 day, 2 consecutive days, 3 consecutive days, 4 consecutive days, 5 consecutive days, or more. In particular embodiments, G-CSF can be administered for 4 consecutive days. In particular embodiments, G-CSF can be administered for 5 consecutive days. In particular embodiments, as a single agent, G-CSF can be used at a dose of 10 μg/kg subcutaneously daily, initiated 3, 4, 5, 6, 7, or 8 days before viral vector delivery. In particular embodiments, G-CSF can be administered as a single agent followed by concurrent administration with another mobilization factor. In particular embodiments, G-CSF can be administered as a single agent followed by concurrent administration with AMD3100. In particular embodiments, a treatment protocol includes a 5 day treatment where G-CSF can be administered on day 1, day 2, day 3, and day 4 and on day 5, G-CSF and AMD3100 are administered 6 to 8 hours prior to viral vector administration.

[0268] Therapeutically effective amounts of GM-CSF to administer can include doses ranging from, for example, 0.1 to 50 μg/kg or from 0.5 to 30 μg/kg. In particular embodiments, a dose at which GM-CSF can be administered includes 0.5 μg/kg, 1 μg/kg, 2 μg/kg, 3 μg/kg, 4 μg/kg, 5 μg/kg, 6 μg/kg, 7 μg/kg, 8 μg/kg, 9 μg/kg, 10 μg/kg, 11 μg/kg, 12 μg/kg, 13 μg/kg, 14 μg/kg, 15 μg/kg, 16 μg/kg, 17 μg/kg, 18 μg/kg, 19 μg/kg, 20 μg/kg, or more. In particular embodiments, GM-CSF can be administered subcutaneously for 1 day, 2 consecutive days, 3 consecutive days, 4 consecutive days, 5 consecutive days, or more. In particular embodiments, GM-CSF can be administered subcutaneously or intravenously. In particular embodiments, GM-CSF can be administered at a dose of 10 μg/kg subcutaneously daily initiated 3, 4, 5, 6, 7, or 8 days before viral vector delivery. In particular embodiments, GM-CSF can be administered as a single agent followed by concurrent administration with another mobilization factor. In particular embodiments, GM-CSF can be administered as a single agent followed by concurrent administration with AMD3100. In particular embodiments, a treatment protocol includes a 5 day treatment where GM-CSF can be administered on day 1, day 2, day 3, and day 4 and on day 5, GM-CSF and AMD3100 are administered 6 to 8 hours prior to viral vector administration. A dosing regimen for Sargramostim can include 200 μg/m², 210 μg/m², 220 μg/m², 230 μg/m², 240 μg/m², 250 μg/m², 260 μg/m², 270 μg/m², 280 μg/m², 290 μg/m², 300 μg/m², or more. In particular embodiments, Sargramostim can be administered for 1 day, 2 consecutive days, 3 consecutive days, 4 consecutive days, 5 consecutive days, or more. In particular embodiments, Sargramostim can be administered subcutaneously or intravenously. In particular embodiments, a dosing regimen for Sargramostim can include 250 μg/m²/day intravenous or subcutaneous and can be continued until a targeted cell amount is reached in the peripheral blood or can be continued for 5 days. In particular embodiments, Sargramostim can be administered as a single agent followed by concurrent administration with another mobilization factor. In particular embodiments, Sargramostim can be administered as a single agent followed by concurrent administration with AMD3100. In particular embodiments, a treatment protocol includes a 5 day treatment where Sargramostim can be administered on day 1, day 2, day 3, and day 4 and on day 5, Sargramostim and AMD3100 are administered 6 to 8 hours prior to viral vector administration.

[0269] In particular embodiments, a therapeutically effective amount of AMD3100 includes 0.1 mg/kg to 100 mg/kg. In particular embodiments, a therapeutically effective amount of AMD3100 includes 0.5 mg/kg to 50 mg/kg. In particular embodiments, a therapeutically effective amount of AMD3100 includes 0.5 mg/kg, 1 mg/kg, 2 mg/kg, 3 mg/kg, 4 mg/kg, 5 mg/kg, 6 mg/kg, 7 mg/kg, 8 mg/kg, 9 mg/kg, 10 mg/kg, 11 mg/kg, 12 mg/kg, 13 mg/kg, 14 mg/kg, 15 mg/kg, 16 mg/kg, 17 mg/kg, 18 mg/kg, 19 mg/kg, 20 mg/kg, or more. In particular embodiments, a therapeutically effective amount of AMD3100 includes 4 mg/kg. In particular embodiments, a therapeutically effective amount of AMD3100 includes 5 mg/kg. In particular embodiments, a therapeutically effective amount of AMD3100 includes 10 μg/kg to 500 μg/kg or from 50 μg/kg to 400 μg/kg. In particular embodiments, a therapeutically effective amount of AMD3100 includes 100 μg/kg, 150 μg/kg, 200 μg/kg, 250 μg/kg, 300 μg/kg, 350 μg/kg, or more. In particular embodiments, AMD3100 can be administered subcutaneously or intravenously. In particular embodiments, AMD3100 can be administered subcutaneously at 160-240 μg/kg 6 to 11 hours prior to viral vector delivery. In particular embodiments, a therapeutically effective amount of AMD3100 can be administered concurrently with administration of another mobilization factor. In particular embodiments, a therapeutically effective amount of AMD3100 can be administered following administration of another mobilization factor. In particular embodiments, a therapeutically effective amount of AMD3100 can be administered following administration of G-CSF. In particular embodiments, a treatment protocol includes a 5-day treatment where G-CSF is administered on day 1, day 2, day 3, and day 4 and on day 5, G-CSF and AMD3100 are administered 6 to 8 hours prior to viral vector injection.

[0270] Therapeutically effective amounts of SCF to administer can include doses ranging from, for example, 0.1 to 100 μg/kg/day or from 0.5 to 50 μg/kg/day. In particular embodiments, a dose at which SCF can be administered includes 0.5 μg/kg/day, 1 μg/kg/day, 2 μg/kg/day, 3 μg/kg/day, 4 μg/kg/day, 5 μg/kg/day, 6 μg/kg/day, 7 μg/kg/day, 8 μg/kg/day, 9 μg/kg/day, 10 μg/kg/day, 11 μg/kg/day, 12 μg/kg/day, 13 μg/kg/day, 14 μg/kg/day, 15 μg/kg/day, 16 μg/kg/day, 17 μg/kg/day, 18 μg/kg/day, 19 μg/kg/day, 20 μg/kg/day, 21 μg/kg/day, 22 μg/kg/day, 23 μg/kg/day, 24 μg/kg/day, 25 μg/kg/day, 26 μg/kg/day, 27 μg/kg/day, 28 μg/kg/day, 29 μg/kg/day, 30 μg/kg/day, or more. In particular embodiments, SCF can be administered for 1 day, 2 consecutive days, 3 consecutive days, 4 consecutive days, 5 consecutive days, or more. In particular embodiments, SCF can be administered subcutaneously or intravenously. In particular embodiments, SCF can be injected subcutaneously at 20 μg/kg/day. In particular embodiments, SCF can be administered as a single agent followed by concurrent administration with another mobilization factor. In particular embodiments, SCF can be administered as a single agent followed by concurrent administration with AMD3100. In particular embodiments, a treatment protocol includes a 5 day treatment where SCF can be administered on day 1, day 2, day 3, and day 4 and on day 5, SCF and AMD3100 are administered 6 to 8 hours prior to viral vector administration.

[0271] In particular embodiments, growth factors GM-CSF and G-CSF can be administered to mobilize HSPC in the bone marrow niches to the peripheral circulating blood to increase the fraction of HSPCs circulating in the blood. In particular embodiments, mobilization can be achieved with administration of G-CSF/Filgrastim (Amgen) and/or AMD3100 (Sigma). In particular embodiments, mobilization can be achieved with administration of GM-CSF/Sargramostim (Amgen) and/or AMD3100 (Sigma). In particular embodiments, mobilization can be achieved with administration of SCF/Ancestim (Amgen) and/or AMD3100 (Sigma). In particular embodiments, administration of G-CSF/Filgrastim precedes administration of AMD3100. In particular embodiments, administration of G-CSF/Filgrastim occurs concurrently with administration of AMD3100. In particular embodiments, administration of G-CSF/Filgrastim precedes administration of AMD3100, followed by concurrent administration of G-CSF/Filgrastim and AMD3100. US 20140193376 describes mobilization protocols utilizing a CXCR4 antagonist with a 51 P receptor 1 (51 PR1) modulator agent. US 2011/0044997 describes mobilization protocols utilizing a CXCR4 antagonist with a vascular endothelial growth factor receptor (VEGFR) agonist.

[0272] In particular embodiments, an HSC enriching agent, such as a CD19 immunotoxin or 5-FU can be administered to enrich for HSPCs. CD19 immunotoxin can be used to deplete all CD19 lineage cells, which accounts for 30% of bone marrow cells. Depletion encourages exit from the bone marrow. By forcing HSPCs to proliferate (whether via CD19 immunotoxin of 5-FU, this stimulates their differentiation and exit from the bone marrow and increases transgene marking in peripheral blood cells.

[0273] Viral vectors can be administered concurrently with or following administration of one or more immunosuppression agents or immunosuppression regimens, which can include one or more steroids, IL-1 receptor antagonist, and/or an IL-6 receptor antagonist administration. These protocols can alleviate potential side effects of treatments.

[0274] IL-1 receptor antagonists are known and include ADC-1001 (Alligator Bioscience), FX-201 (Flexion Therapeutics), fusion proteins available from Bioasis Technologies, GQ-303 (Genequine Biotherapeutics GmbH), HL-2351 (Handok, Inc.), MBIL-1RA (ProteoThera, Inc.), Anakinra (Pivor Pharmaceuticals), human immunoglobin G or Globulin S (GC Pharma). IL-6 receptor antagonists are also known in the art and include tocilizumab, BCD-089 (Biocad), HS-628 (Zhejiang Hisun Pharm), and APX-007 (Apexigen).

[0275] In various embodiments, an immune suppression regimen is administered to a subject that also receives at least one viral gene therapy vector, where the immune suppression regimen includes administration of at least one immune suppression agent to the subject on (i) one or more days prior to administration to the subject of a first dose of the viral gene therapy vector; (ii) on the same day as administration of a first dose of the viral gene therapy vector; (iii) on the same day as administration of one or more second or other subsequent doses of the viral gene therapy vector; and/or (iv) on any of one or more, or all, days intervening between administration to the subject of the first dose of the viral gene therapy vector and administration of any of one or more, or all, second or other subsequent doses of the viral gene therapy vector.

[0276] In vitro gene therapy includes use of a vector, genome, or system of the present disclosure in a method of introducing exogenous DNA into a host cell (such as a target cell) and/or a nucleic acid (such as a target nucleic acid, such as a target genome), where the host cell or nucleic acid is not present in a multicellular organism (e.g., in a laboratory). In some embodiments, a target cell or nucleic acid is derived from a multicellular organism, such as a mammal (e.g., a mouse, rat, human, or non-human primate). In vitro engineering of a cell derived from a multicellular organism can be referred to as ex vivo engineering and can be used in ex vivo therapy. In various embodiments, methods and compositions of the present disclosure are utilized, e.g., as disclosed herein, to modify a target cell or nucleic acid derived from a first multicellular organism and the engineered target cell or nucleic acid is then administered to a second multicellular organism, such as a mammal (e.g., a mouse, rat, human, or non-human primate), e.g., in a method of adoptive cell therapy. In some instances, the first and second organisms are the same single subject organism. Return of in vitro engineered material to a subject from which the material was derived can be an autologous therapy. In some instances, the first and second organisms are different organisms (e.g., two organisms of the same species, e.g., two mice, two rats, two humans, or two non-human primates of the same species). Transfer of engineered material derived from a first subject to a second different subject can be an allogeneic therapy.

[0277] Ex vivo cell therapies can include isolation of stem, progenitor or differentiated cells from a patient or a normal donor, expansion of isolated cells ex vivo—with or without genetic engineering—and administration of the cells to a subject to establish a transient or stable graft of the infused cells and/or their progeny. Such ex vivo approaches can be used, for example, to treat an inherited, infectious or neoplastic disease, to regenerate a tissue or to deliver a therapeutic agent to a disease site. In various ex vivo therapies there is no direct exposure of the subject to the gene transfer vector, and the target cells of transduction can be selected, expanded and/or differentiated, before or after any genetic engineering, to improve efficacy and safety.

[0278] Ex vivo therapies include hematopoietic stem cell (HSC) transplantation (HCT). Autologous HSC gene therapy represents a therapeutic option for several monogenic diseases of the blood and the immune system as well as for storage disorders, and it may become a first-line treatment option for selected disease conditions. Another established cell and gene therapy application is adoptive immunotherapy, which exploits ex vivo expanded T cells, with or without genetic engineering to redirect their antigen specificity or to increase their safety profile, in order to harness the power of immune effector and regulatory cells for use against malignancies, infections and autoimmune diseases. A range of other types of somatic stem cells—in some cases involving genetic engineering—are showing promise for therapeutic applications, including epidermal and limbal stem cells, neural stem/progenitor cells (NSPCs), cardiac stem cells and multipotent stromal cells (MSCs).

[0279] Applications of ex-vivo therapy include reconstituting dysfunctional cell lineages. For inherited diseases characterized by a defective or absent cell lineage, the lineage can be regenerated by functional progenitor cells, derived either from normal donors or from autologous cells that have been subjected to ex vivo gene transfer to correct the deficiency. An example is provided by SCIDs, in which a deficiency in any one of several genes blocks the development of mature lymphoid cells. Transplantation of non-manipulated normal donor HSCs, which can allow generation of donor-derived functional hematopoietic cells of various lineages in the host, represents a therapeutic option for SCIDs, as well as many other diseases that affect the blood and immune system. Autologous HSC gene therapy, which can include replacing a functional copy of a defective gene in transplanted hematopoietic stem/progenitor cells (HSPCs) and, similarly to HCT, can provide a steady supply of functional progeny, may have several advantages, including reduced risk of graft versus host disease (GvHD), reduced risk of graft rejection, and reduced need for post-transplant immunosuppression.

[0280] Applications of ex-vivo therapy include augmenting therapeutic gene dosage. In some applications, HSC gene therapy may augment the therapeutic efficacy of allogenic HCT. Therapeutic gene dosage can be engineered to supra-normal levels in transplanted cells.

[0281] Applications of ex-vivo therapy include introducing novel function and targeting gene therapy. Ex vivo gene therapy can confer a novel function to HSCs or their progeny, such as establishing drug resistance to allow administration of a high-dose antitumor chemotherapy regime or establishing resistance to a pre-established infection with a virus, such as HIV, or other pathogen by expressing RNA-based agents (for example, ribozymes, RNA decoys, antisense RNA, RNA aptamers and small interfering RNA) and protein-based agents (for example, dominant-negative mutant viral proteins, fusion inhibitors and engineered nucleases that target the pathogen's genome).

[0282] Applications of ex-vivo therapy include enhancing immune responses. In neoplastic diseases, allogenic adaptive immune cell types, such as T cells, can recognize and kill cancer cells. Unfortunately, recognition of healthy tissues by alloreactive lymphocytes can also result in detrimental GvHD. Transfer of a suicide gene in donor lymphocytes allows their anti-tumor potential to be exploited, while taming their toxicity. In the autologous setting, lymphocytes with specificity directed against transformed or infected cells may be isolated from the patient's tissues and selectively expanded ex vivo. Alternatively, they may be generated by transfer of a gene for a synthetic or chimeric antigen receptor that triggers the cell's response when it encounters transformed or infected cells. These approaches may potentiate an underlying host response to a tumor or infection, or induce it de novo.

[0283] Therapeutic cell formulations and CD33-targeting agent compositions can be formulated for administration to subjects. In particular embodiments, cell-based formulations are administered to subjects as soon as reasonably possible following their initial formulation. In particular embodiments, formulations and/or compositions can be frozen (e.g., cryopreserved or lyophilized) prior to administration to a subject.

[0284] For example, as is understood by one of ordinary skill in the art, the freezing of cells can be destructive (see Mazur, P., 1977, Cryobiology 14:251-272) but there are numerous procedures available to prevent such damage. For example, damage can be avoided and/or reduced by (a) use of a cryoprotective agent, (b) control of the freezing rate, and/or (c) storage at a temperature sufficiently low to minimize degradative reactions. Exemplary cryoprotective agents include dimethyl sulfoxide (DMSO) (Lovelock and Bishop, 1959, Nature 183:1394-1395; Ashwood-Smith, 1961, Nature 190:1204-1205), glycerol, polyvinylpyrrolidine (Rinfret, 1960, Ann. N.Y. Acad. Sci. 85:576), polyethylene glycol (Sloviter and Ravdin, 1962, Nature 196:548), albumin, dextran, sucrose, ethylene glycol, i-erythritol, D-ribitol, D-mannitol (Rowe et al., 1962, Fed. Proc. 21:157), D-sorbitol, i-inositol, D-lactose, choline chloride (Bender et al., 1960, J. Appl. Physiol. 15:520), amino acids (Phan The Tran and Bender, 1960, Exp. Cell Res. 20:651), methanol, acetamide, glycerol monoacetate (Lovelock, 1954, Biochem. J. 56:265), and inorganic salts (Phan The Tran & Bender, 1960, Proc. Soc. Exp. Biol. Med. 104:388; Phan The Tran & Bender, 1961, in Radiobiology, Proceedings of the Third Australian Conference on Radiobiology, Ilbery ed., Butterworth, London, p. 59). In particular embodiments, DMSO can be used. Addition of plasma (e.g., to a concentration of 20-25%) can augment the protective effects of DMSO. After addition of DMSO, cells can be kept at 0° C. until freezing, because DMSO concentrations of 1% can be toxic at temperatures above 4° C.

[0285] In the cryopreservation of cells, slow controlled cooling rates can be critical and different cryoprotective agents (Rapatz et al., 1968, Cryobiology 5(1): 18-25) and different cell types have different optimal cooling rates (see e.g., Rowe & Rinfret, 1962, Blood 20:636; Rowe, 1966, Cryobiology 3(1):12-18; Lewis et al., 1967, Transfusion 7(1):17-32; and Mazur, 1970, Science 168:939-949 for effects of cooling velocity on survival of stem cells and on their transplantation potential). The heat of fusion phase where water turns to ice should be minimal. The cooling procedure can be carried out by use of, e.g., a programmable freezing device or a methanol bath procedure. Programmable freezing apparatuses allow determination of optimal cooling rates and facilitate standard reproducible cooling.

[0286] In particular embodiments, DMSO-treated cells can be pre-cooled on ice and transferred to a tray containing chilled methanol which is placed, in turn, in a mechanical refrigerator (e.g., Harris® (Thermo Fisher Scientific Inc., Waltham, Mass.) or Revco® (Thermo Fisher Scientific Inc., Waltham, Mass.)) at −80° C. Thermocouple measurements of the methanol bath and the samples indicate a cooling rate of 1° to 3° C./minute can be preferred. After at least two hours, the specimens can have reached a temperature of −80° C. and can be placed directly into liquid nitrogen (−196° C.).

[0287] After thorough freezing, the cells can be rapidly transferred to a long-term cryogenic storage vessel. In a preferred embodiment, samples can be cryogenically stored in liquid nitrogen (−196° C.) or vapor (−1° C.). Such storage is facilitated by the availability of highly efficient liquid nitrogen refrigerators.

[0288] Further considerations and procedures for the manipulation, cryopreservation, and long-term storage of cells, can be found in the following exemplary references: U.S. Pat. Nos. 4,199,022; 3,753,357; and 4,559,298; Gorin, 1986, Clinics In Haematology 15(1):19-48; Bone-Marrow Conservation, Culture and Transplantation, Proceedings of a Panel, Moscow, Jul. 22-26, 1968, International Atomic Energy Agency, Vienna, pp. 107-186; Livesey and Linner, 1987, Nature 327:255; Linner et al., 1986, J. Histochem. Cytochem. 34(9):1123-1135; Simione, 1992, J. Parenter. Sci. Technol. 46(6):226-32).

[0289] Following cryopreservation, frozen cells can be thawed for use in accordance with methods known to those of ordinary skill in the art. Frozen cells are preferably thawed quickly and chilled immediately upon thawing. In particular embodiments, the vial containing the frozen cells can be immersed up to its neck in a warm water bath; gentle rotation will ensure mixing of the cell suspension as it thaws and increase heat transfer from the warm water to the internal ice mass. As soon as the ice has completely melted, the vial can be immediately placed on ice.

[0290] In particular embodiments, methods can be used to prevent cellular clumping during thawing. Exemplary methods include: the addition before and/or after freezing of DNase (Spitzer et al., 1980, Cancer 45:3075-3085), low molecular weight dextran and citrate, hydroxyethyl starch (Stiff et al., 1983, Cryobiology 20:17-24), etc.

[0291] As is understood by one of ordinary skill in the art, if a cryoprotective agent that is toxic to humans is used, it should be removed prior to therapeutic use. In various embodiments, DMSO is regarded as a solvent that is suitable and/or safe for human use, and/or has no serious toxicity.

[0292] Exemplary carriers and modes of administration of cells are described at pages 14-15 of U.S. Patent Publication No. 2010/0183564. Additional pharmaceutical carriers are described in Remington: The Science and Practice of Pharmacy, 21st Edition, David B. Troy, ed., Lippicott Williams & Wilkins (2005).

[0293] In particular embodiments, cells can be harvested from a culture medium, and washed and concentrated into a carrier in a therapeutically-effective amount. Exemplary carriers include saline, buffered saline, physiological saline, water, Hanks' solution, Ringers solution, Nonnosol-R (Abbott Labs, Chicago, Ill.), Plasma-Lyte A® (Baxter Laboratories, Inc., Morton Grove, Ill.), glycerol, ethanol, and combinations thereof.

[0294] In particular embodiments, carriers can be supplemented with human serum albumin (HSA) or other human serum components or fetal bovine serum. In particular embodiments, a carrier for infusion includes buffered saline with 5% HAS or dextrose. Additional isotonic agents include polyhydric sugar alcohols including trihydric or higher sugar alcohols, such as glycerin, erythritol, arabitol, xylitol, sorbitol, or mannitol.

[0295] Carriers can include buffering agents, such as citrate buffers, succinate buffers, tartrate buffers, fumarate buffers, gluconate buffers, oxalate buffers, lactate buffers, acetate buffers, phosphate buffers, histidine buffers, and/or trimethylamine salts.

[0296] Stabilizers refer to a broad category of excipients which can range in function from a bulking agent to an additive which helps to prevent cell adherence to container walls. Typical stabilizers can include polyhydric sugar alcohols; amino acids, such as arginine, lysine, glycine, glutamine, asparagine, histidine, alanine, ornithine, L-leucine, 2-phenylalanine, glutamic acid, and threonine; organic sugars or sugar alcohols, such as lactose, trehalose, stachyose, mannitol, sorbitol, xylitol, ribitol, myoinisitol, galactitol, glycerol, and cyclitols, such as inositol; PEG; amino acid polymers; sulfur-containing reducing agents, such as urea, glutathione, thioctic acid, sodium thioglycolate, thioglycerol, alpha-monothioglycerol, and sodium thiosulfate; low molecular weight polypeptides (i.e., <10 residues); proteins such as HSA, bovine serum albumin, gelatin or immunoglobulins; hydrophilic polymers such as polyvinylpyrrolidone; monosaccharides such as xylose, mannose, fructose and glucose; disaccharides such as lactose, maltose and sucrose; trisaccharides such as raffinose, and polysaccharides such as dextran.

[0297] Where necessary or beneficial, compositions or formulations can include a local anesthetic such as lidocaine to ease pain at a site of injection.

[0298] Exemplary preservatives include phenol, benzyl alcohol, meta-cresol, methyl paraben, propyl paraben, octadecyldimethylbenzyl ammonium chloride, benzalkonium halides, hexamethonium chloride, alkyl parabens such as methyl or propyl paraben, catechol, resorcinol, cyclohexanol, and 3-pentanol.

[0299] Therapeutically effective amounts of cells within cell-based formulations can be greater than 10² cells, greater than 10³ cells, greater than 10⁴ cells, greater than 10⁵ cells, greater than 10⁶ cells, greater than 10⁷ cells, greater than 10⁸ cells, greater than 10⁹ cells, greater than 10¹⁰ cells, or greater than 10¹¹ cells. In cell-based formulations disclosed herein, cells are generally in a volume of a liter or less, 500 ml or less, 250 ml or less, or 100 ml or less. Hence the density of administered cells is typically greater than 10⁴ cells/ml, 10⁷ cells/ml or 10⁸ cells/ml.

[0300] Therapeutically effective amounts of protein-based compounds within CD33 targeting compositions can include 0.1 to 5 μg or μg/mL or L, or from 0.5 to 1 μg or μg/mL or L. In other examples, a dose can include 1 μg or μg/mL or L, 15 μg or μg/mL or L, 30 μg or μg/mL or L, 50 μg or μg/mL or L, 55 μg or μg/mL or L, 70 μg or μg/mL or L, 90 μg or μg/mL or L, 150 μg or μg/mL or L, 350 μg or μg/mL or L, 500 μg or μg/mL or L, 750 μg or μg/mL or L, 1000 μg or μg/mL or L, 0.1 to 5 mg/mL or L or from 0.5 to 1 mg/mL or L. In other examples, a dose can include 1 mg/mL or L, 10 mg/mL or L, 30 mg/mL or L, 50 mg/mL or L, 70 mg/mL or L, 100 mg/mL or L, 300 mg/mL or L, 500 mg/mL or L, 700 mg/mL or L, 1000 mg/mL or L or more.

[0301] Cell formulations and CD33 targeting compositions can be prepared for administration by, for example, injection, infusion, perfusion, or lavage. CD33-targeting agent compositions can also be prepared as oral, inhalable, or implantable compositions.

[0302] Vectors and formulations disclosed herein can be used for treating subjects (e.g., humans, veterinary animals (e.g., dogs, cats, reptiles, birds, etc.), livestock (e.g., horses, cattle, goats, pigs, chickens, etc.), and research animals (e.g., non-human primates, monkeys, rats, mice, fish, etc.). In particular embodiments, subjects are human. Treating subjects includes delivering therapeutically effective amounts of one or more vectors, genomes, or systems of the present disclosure. Therapeutically effective amounts include those that provide effective amounts, prophylactic treatments, and/or therapeutic treatments.

[0303] Various formulations are known in the art for each reagent and/or technique of delivering a heterologous nucleic acid to a target cell.

### Anti-CD33 Agents

[0304] The present disclosure includes, among other things, administering an anti-CD33 agent to a subject or system that includes one or more CD33-expressing and/or CD33-inactivated (a.k.a., CD33-disrupted) cells.

[0305] An anti-CD33 agent (also referred to herein by the synonymous term CD33-targeting agent) can refer to a molecule, cell, drug, or combination thereof that targets CD33-expressing cells for cell death or to inhibit cell growth. CD33-targeting agents include molecules that result in the elimination of CD33-expressing cells. Examples of CD33-targeting agents include anti-CD33 antibodies; anti-CD33 immunotoxins; anti-CD33 antibody-drug conjugates; anti-CD33 antibody-radioisotope conjugates; anti-CD33 multispecific antibodies (e.g. bispecific and trispecific antibodies, e.g., bispecific and trispecific antibodies that bind CD33 and an immune-activating epitope on an immune cell (e.g., CD3 as in BiTE®); and/or immune cells expressing CARs or engineered TCRs that specifically bind CD33. Anti-CD33 antibodies are described above in relation to binding domains. Each of these types of CD33-targeting agents include a binding domain that binds CD33, and most (e.g., except certain antibody forms) also include a linker. Accordingly, CD33 binding domains are described first and a general description of linkers is provided next. Following this description of CD33 binding domains and linkers, more particular information regarding the different CD33-targeting agents is provided.

[0306] CD33 Binding Domains. Binding domains include any substance that binds to CD33 to form a complex. The choice of binding domain can depend upon the type and number of CD33 markers that define the surface of a target cell or the type of selected CD33-targeting agent. Examples of binding domains include cellular marker ligands, receptor ligands, antibodies, antibody binding domains, peptides, peptide aptamers, receptors (e.g., T cell receptors), or combinations and engineered fragments or formats thereof.

[0307] Antibodies are one example of binding domains and include whole antibodies or binding fragments of an antibody, e.g., Fv, Fab, Fab′, F(ab′)2, and single chain (sc) forms and fragments thereof that bind specifically CD33. Antibodies or antigen binding fragments can include all or a portion of polyclonal antibodies, monoclonal antibodies, human antibodies, humanized antibodies, synthetic antibodies, non-human antibodies, recombinant antibodies, chimeric antibodies, bispecific antibodies, mini bodies, and linear antibodies.

[0308] Antibodies can be produced from two genes, a heavy chain gene and a light chain gene. Generally, an antibody can include two identical copies of a heavy chain, and two identical copies of a light chain. Within a variable heavy chain and variable light chain, segments referred to as complementary determining regions (CDRs) dictate epitope binding. Each heavy chain has three CDRs (i.e., CDRH1, CDRH2, and CDRH3) and each light chain has three CDRs (i.e., CDRL1, CDRL2, and CDRL3). CDR regions are flanked by framework residues (FR).

[0309] Anti-CD33 bispecific antibodies bind at least two epitopes wherein at least one of the epitopes is located on CD33. Anti-CD33 trispecific antibodies bind at least 3 epitopes, wherein at least one of the epitopes is located on CD33.

[0310] Some examples of bispecific antibodies have two heavy chains (each having three heavy chain CDRs, followed by (N-terminal to C-terminal) a CH1 domain, a hinge, a CH2 domain, and a CH3 domain), and two immunoglobulin light chains that confer antigen-binding specificity through association with each heavy chain. However, additional architectures can be used, including bispecific antibodies in which the light chain(s) associate with each heavy chain but do not (or minimally) contribute to antigen-binding specificity, or that can bind one or more of the epitopes bound by the heavy chain antigen-binding regions, or that can associate with each heavy chain and enable binding of one or both of the heavy chains to one or both epitopes. Other forms of bispecific antibodies include the single chain “Janusins” described in Traunecker et al. (Embo Journal, 10, 3655-3659, 1991).

[0311] Bispecific antibodies can be prepared as full-length antibodies or antibody fragments (for example, F(ab′)₂ bispecific antibodies).

[0312] Methods for making bispecific antibodies are also described in Millstein et al. Nature 305:37-39, 1983; WO 1993/008829; and Traunecker et al., EMBO J. 10:3655-3659, 1991. In particular embodiments, bispecific antibodies can be prepared using chemical linkage. For example, Brennan et al. (Science 229: 81, 1985) describes a procedure wherein intact antibodies are proteolytically cleaved to generate F(ab′)₂ fragments. These fragments are reduced in the presence of the dithiol complexing agent, sodium arsenite, to stabilize vicinal dithiols and prevent intermolecular disulfide formation. The Fab′ fragments generated then are converted to thionitrobenzoate (TNB) derivatives. One of the Fab′-TNB derivatives then is reconverted to the Fab′-thiol by reduction with mercaptoethylamine and is mixed with an equimolar amount of the other Fab′-TNB derivative to form the bispecific antibody.

[0313] In particular embodiments, the disclosure provides proteins that bind with a cognate binding molecule with an association rate constant or kₒₙ rate of not more than 10⁷ M⁻¹ s⁻¹, less than 5×10⁶ M⁻¹ s⁻¹, less than 2.5×10⁶ M⁻¹ s⁻¹, less than 2×10⁶ M⁻¹ s⁻¹, less than 1.5×10⁶ M⁻¹ s⁻¹, less than 10⁶ M⁻¹ s⁻¹, less than 5×10⁵ M⁻¹ s⁻¹, less than 2.5×10⁵ M⁻¹ s⁻¹, less than 2×10⁵ M⁻¹ s⁻¹, less than 1.5×10⁵ M⁻¹ s⁻¹, less than 10⁵ M⁻¹ s⁻¹, less than 5×10⁴ M⁻¹ s⁻¹, less than 2.5×10⁴ M⁻¹ s⁻¹, less than 2×10⁴ M⁻¹ s⁻¹, less than 1.5×10⁴ M's′, less than 10⁴ M's′, less than 10³ M⁻¹ s⁻¹, less than 10² M⁻¹ s⁻¹, or in a range of 10² M⁻¹ s⁻¹ to 10⁷ M⁻¹ s⁻¹, in a range of 10³ M⁻¹ s⁻¹ to 10⁶ M⁻¹ s⁻¹, in a range of 10⁴ M⁻¹ s⁻¹ to 10⁵ M⁻¹ s⁻¹, or in a range of 10³ M⁻¹ s⁻¹ to 10⁷ M⁻¹ s⁻¹.

[0314] In particular embodiments, the disclosure provides proteins that bind with a cognate binding molecule a k_{off} rate of not less than 0.5 s⁻¹, not less than 0.25 s⁻¹, not less than 0.2 s⁻¹, not less than 0.1 s⁻¹, not less than 5×10⁻² s⁻¹, not less than 2.5×10⁻² s⁻¹, not less than 2×10⁻² s⁻¹, not less than 1.5×10⁻² s⁻¹, not less than 10⁻² s⁻¹, not less than 5×10⁻³ s⁻¹, not less than 2.5×10⁻³ s⁻¹, not less than 2×10⁻³ s⁻¹, not less than 1.5×10⁻³ s⁻¹, not less than 10⁻³ s⁻¹, not less than 5×10⁻⁴ s⁻¹, not less than 2.5×10⁻⁴ s⁻¹, not less than 2×10⁻⁴ s⁻¹, not less than 1.5×10⁻⁴ s⁻¹, not less than 10⁻⁴ s⁻¹, not less than 5×10⁻⁵ s⁻¹, not less than 2.5×10⁻⁵ s⁻¹, not less than 2×10⁻⁵ s⁻¹, not less than 1.5×10⁻⁵ s⁻¹, not less than 10⁻⁵ s⁻¹, not less than 5×10⁻⁶ s⁻¹, not less than 2.5×10⁻⁶ s⁻¹, not less than 2×10⁻⁶ s⁻¹, not less than 1.5×10⁻⁶ s⁻¹, not less than 10⁻⁶ s⁻¹, or in a range of 0.5 to 10⁻⁶ s⁻¹, in a range of 10⁻² s⁻¹ to 10⁻⁵ s⁻¹, or in a range of 10⁻³ s⁻¹ to 10⁻⁴ s⁻¹.

[0315] In particular embodiments, the disclosure provides proteins that bind with a cognate binding molecule with an affinity constant or Kₐ (kₒₙ/k_{off}) of, either before and/or after modification, less than 10⁶ M⁻¹, less than 5×10⁵ M⁻¹, less than 2.5×10⁵ M⁻¹, less than 2×10⁵ M⁻¹, less than 1.5×10⁵ M⁻¹, less than 10⁵ M⁻¹, less than 5×10⁴ M⁻¹, less than 2.5×10⁴ M⁻¹, less than 2×10⁴ M⁻¹, less than 1.5×10⁴ M⁻¹, less than 10⁴ M⁻¹, less than 5×10³ M⁻¹, less than 2.5×10³ M⁻¹, less than 2×10³ M⁻¹, less than 1.5×10³ M⁻¹, less than 10³ M⁻¹, less than 500 M⁻¹, less than 250 M⁻¹, less than 200 M⁻¹, less than 150 M⁻¹, less than 100 M⁻¹, less than 50 M⁻¹, less than 25 M⁻¹, less than 20 M⁻¹, less than 15 M⁻¹, or less than 10 M⁻¹, or in a range of 10 M⁻¹ to 10⁶ M⁻¹, in a range of 10² M⁻¹ to 10⁵ M⁻¹, or in a range of 10³ M⁻¹ to 1×10⁴ M⁻¹.

[0316] In particular embodiments, the disclosure provides proteins that bind with a cognate binding molecule with a dissociation constant or K_{d} (k_{off}/kₒₙ) of, either before and/or after modification, not less than 0.05 M, not less than 0.025 M, not less than 0.02 M, not less than 0.01 M, not less than 5×10⁻³ M, not less than 2.5×10⁻³ M, not less than 2×10⁻³ M, not less than 1.5×10⁻³ M, not less than 10⁻³ M, not less than 5×10⁻⁴ M, not less than 2.5×10⁻⁴ M, not less than 2×10⁻⁴ M, not less than 1.5×10⁻⁴ M, not less than 10⁻⁴ M, not less than 5×10⁻⁵ M, not less than 2.5×10⁻⁵ M, not less than 2×10⁻⁵ M, not less than 1.5×10⁻⁵ M, not less than 10⁻⁵ M, not less than 5×10⁻⁶ M, not less than 2.5×10⁻⁶ M, not less than 2×10⁻⁶ M, not less than 1.5×10⁻⁶ M, not less than 10⁻⁶ M, or not less than 10⁻⁷ M, or in a range of 0.05 M to 10⁻⁷ M, in a range of 5×10⁻³ M to 10⁻⁶ M, or in a range of 10⁻⁴ M to 10⁻′M.

[0317] When antibody residues are provided, the assignment of amino acids to each domain is in accordance with Kabat Sequences of Proteins of Immunological Interest (National Institutes of Health, Bethesda, Md. (1987 and 1991)) unless otherwise specified.

[0318] Unless otherwise indicated, aspects of the present disclosure can employ conventional techniques of immunology, molecular biology, microbiology, cell biology and recombinant DNA. These methods are described in the following publications. See, e.g., Sambrook et al. Molecular Cloning: A Laboratory Manual, 2nd Edition (1989); F. M. Ausubel et al. eds., Current Protocols in Molecular Biology, (1987); the series Methods IN Enzymology (Academic Press, Inc.); M. MacPherson et al., PCR: A Practical Approach, IRL Press at Oxford University Press (1991); MacPherson et al., eds. PCR 2: Practical Approach, (1995); Harlow and Lane, eds. Antibodies, A Laboratory Manual, (1988); and R. I. Freshney, ed. Animal Cell Culture (1987).

[0319] In particular embodiments, the CD33 binding domain can be derived from or include hP67.6 which is an anti-CD33 antibody used in the ADC, GO. In particular embodiments, the light chain of hP67.6 includes:

(SEQ ID NO: 32)
MSVPTQVLGLLLLWLTDARCDIQLTQSPSTLSASVGDRVTITCRASESL
DNYGIRFLTWFQQKPGKAPKLLMYAASNQGSGVPSRFSGSGSGTEFTLT
ISSLQPDDFATYYCQQTKEVPWSFGQGTKVEVKRT

[0320] and the heavy chain of hP67.6 includes:

(SEQ ID NO: 33)
MEWSWVFLFFLSVTTGVHSEVQLVQSGAEVKKPGSSVKVSCKASGYTIT
DSNIHWVRQAPGQSLEWIGYIYPYNGGTDYNQKFKNRATLTVDNPTNTA
YMELSSLRSEDTDFYYCVNGNPWLAYWGQGTLVTVSSASTKGP.

[0321] In particular embodiments, the hP67.6 binding domain includes a variable light chain including a CDRL1 sequence including QSPSTLSASV (SEQ ID NO: 34), a CDRL2 sequence including DNYGIRFLTWFQQKPG (SEQ ID NO: 35), and a CDRL3 sequence including FTLTISSL (SEQ ID NO: 36). In particular embodiments, the hP67.6 binding domain includes a variable heavy chain including a CDRH1 sequence including VQSGAEVKKPG (SEQ ID NO: 37), a CDRH2 sequence including DSNIHWV (SEQ ID NO: 38), and a CDRH3 sequence including LTVDNPTNT (SEQ ID NO: 39).

[0322] In particular embodiments, the CD33 binding domain can be derived from or include h2H12EC which is the anti-CD33 antibody used in the ADC, SGN-CD33A. In particular embodiments, the h2H12EC binding domain includes a variable light chain including a CDRL1 sequence including NYDIN (SEQ ID NO: 40), a CDRL2 sequence including WIYPGDGSTKYNEKFKA (SEQ ID NO: 41), and a CDRL3 sequence including GYEDAMDY (SEQ ID NO: 42). In particular embodiments, the h2H12EC binding domain includes a variable heavy chain including a CDRH1 sequence including KASQDINSYLS (SEQ ID NO: 43), a CDRH2 sequence including RANRLVD (SEQ ID NO: 44), and a CDRH3 sequence including LQYDEFPLT (SEQ ID NO: 45).

[0323] Additional examples of anti-CD33 antibody heavy and light chains, as well as specific CDRs, include those described in U.S. Pat. No. 7,557,189. For instance, in particular embodiments, a light chain of a representative anti-CD33 antibody includes:

(SEQ ID NO: 46)
NIMLTQSPSSLAVSAGEKVTMSCKSSQSVFFSSSQKNYLAWYQQIPGQS
PKLLIYWASTRESGVPDRFTGSGSGTDFTLTISSVQSEDLAIYYCHQYL
SSRTFGGGTKLEIKR

[0324] and a heavy chain of this representative anti-CD33 antibody includes:

(SEQ ID NO: 47)
QVQLQQPGAEVVKPGASVKMSCKASGYTFTSYYIHWIKQTPGQGLEWVG
VIYPGNDDISYNQKFKGKATLTADKSSTTAYMQLSSLTSEDSAVYYCAR
EVRLRYFDVWGAGTTVTVSS .

[0325] In particular embodiments, the CD33 binding domain includes a variable light chain including a CDRL1 sequence including SYYIH (SEQ ID NO: 105), a CDRL2 sequence including VIYPGNDDISYNQKFXG (SEQ ID NO: 48) wherein X is K or Q, and a CDRL3 sequence including EVRLRYFDV (SEQ ID NO: 49). In particular embodiments, the CD33 binding domain includes a variable heavy chain including a CDRH1 sequence including KSSQSVFFSSSQKNYLA (SEQ ID NO: 50), a CDRH2 sequence including WASTRES (SEQ ID NO: 51), and a CDRH3 sequence including HQYLSSRT (SEQ ID NO: 52).

[0326] In some instances, it is beneficial for the binding domain to be derived from the same species it will ultimately be used in. For example, for use in humans, it may be beneficial for the antigen binding domain to include a human antibody, humanized antibody, or a fragment or engineered form thereof. Antibodies from human origin or humanized antibodies have lowered or no immunogenicity in humans and have a lower number of non-immunogenic epitopes compared to non-human antibodies. Antibodies and their engineered fragments will generally be selected to have a reduced level or no antigenicity in human subjects.

[0327] In particular embodiments, the binding domain includes a humanized antibody or an engineered fragment thereof. In particular embodiments, a non-human antibody is humanized, where one or more amino acid residues of the antibody are modified to increase similarity to an antibody naturally produced in a human or fragment thereof. These nonhuman amino acid residues are often referred to as “import” residues, which are typically taken from an “import” variable domain. As provided herein, humanized antibodies or antibody fragments include one or more CDRs from nonhuman immunoglobulin molecules and framework regions wherein the amino acid residues including the framework are derived completely or mostly from human germline. In one aspect, the antigen binding domain is humanized. A humanized antibody can be produced using a variety of techniques known in the art, including CDR-grafting (see, e.g., European Patent No. EP 239,400; WO 91/09967; and U.S. Pat. Nos. 5,225,539, 5,530,101, and 5,585,089), veneering or resurfacing (see, e.g., EP 592,106 and EP 519,596; Padlan, 1991, Molecular Immunology, 28(4/5):489-498; Studnicka et al., 1994, Protein Engineering, 7(6):805-814; and Roguska et al., 1994, PNAS, 91:969-973), chain shuffling (see, e.g., U.S. Pat. No. 5,565,332), and techniques disclosed in, e.g., US 2005/0042664, US 2005/0048617, U.S. Pat. Nos. 6,407,213, 5,766,886, WO 9317105, Tan et al., J. Immunol., 169:1119-25 (2002), Caldas et al., Protein Eng., 13(5):353-60 (2000), Morea et al., Methods, 20(3):267-79 (2000), Baca et al., J. Biol. Chem., 272(16): 10678-84 (1997), Roguska et al., Protein Eng., 9(10):895-904 (1996), Couto et al., Cancer Res., 55 (23 Supp):5973s-5977s (1995), Couto et al., Cancer Res., 55(8):1717-22 (1995), Sandhu J S, Gene, 150(2):409-10 (1994), and Pedersen et al., J. Mol. Biol., 235(3):959-73 (1994). Often, framework residues in the framework regions will be substituted with the corresponding residue from the CDR donor antibody to alter, for example improve, cellular marker binding. These framework substitutions are identified by methods well-known in the art, e.g., by modeling of the interactions of the CDR and framework residues to identify framework residues important for cellular marker binding and sequence comparison to identify unusual framework residues at particular positions. (See, e.g., U.S. Pat. No. 5,585,089; and Riechmann et al., Nature, 332:323, 1988)

[0328] Antibodies with binding domains that specifically bind CD33 can be prepared using methods of obtaining monoclonal antibodies, methods of phage display, methods to generate human or humanized antibodies, or methods using a transgenic animal or plant engineered to produce antibodies as is known to those of ordinary skill in the art (see, for example, U.S. Pat. Nos. 6,291,161 and 6,291,158). Phage display libraries of partially or fully synthetic antibodies are available and can be screened for an antibody or fragment thereof that can bind to CD33. For example, binding domains may be identified by screening a Fab phage library for Fab fragments that specifically bind CD33 (see Hoet et al., Nat. Biotechnol. 23:344, 2005). Phage display libraries of human antibodies are also available. Additionally, traditional strategies for hybridoma development using CD33 as an immunogen in convenient systems (e.g., mice, HuMAb Mouse® (GenPharm Intl Inc., Mountain View, Calif.), TC Mouse® (Kirin Pharma Co. Ltd., Tokyo, JP), KM-Mouse® (Medarex, Inc., Princeton, N.J.), llamas, chicken, rats, hamsters, rabbits, etc.) can be used to develop binding domains. Once identified, the amino acid sequence of the antibody and gene sequence encoding the antibody can be isolated and/or determined.

[0329] As indicated, antibodies can be used as whole antibodies or binding fragments thereof, e.g., Fv, Fab, Fab′, F(ab′)₂, and single chain (sc) forms and fragments thereof that specifically bind CD33.

[0330] In some instances, scFvs can be prepared according to methods known in the art (see, for example, Bird et al., (1988) Science 242:423-426 and Huston et al., (1988) Proc. Natl. Acad. Sci. USA 85:5879-5883). ScFv molecules can be produced by linking VH and VL regions of an antibody together using flexible polypeptide linkers. If a short polypeptide linker is employed (e.g., between 5-10 amino acids) intrachain folding is prevented. Interchain folding is also required to bring the two variable regions together to form a functional epitope binding site. For examples of linker orientations and sizes see, e.g., Hollinger et al. 1993 Proc Natl Acad. Sci. U.S.A. 90:6444-6448, US 2005/0100543, US 2005/0175606, US 2007/0014794, and WO2006/020258 and WO2007/024715. More particularly, linker sequences that are used to connect the VL and VH of an scFv are generally five to 35 amino acids in length. In particular embodiments, a VL-VH linker includes from five to 35, ten to 30 amino acids or from 15 to 25 amino acids. Variation in the linker length may retain or enhance activity, giving rise to superior efficacy in activity studies. scFV are commonly used as the binding domains of CAR discussed below.

[0331] Additional examples of antibody-based binding domain formats include scFv-based grababodies and soluble VH domain antibodies. These antibodies form binding regions using only heavy chain variable regions. See, for example, Jespers et al., Nat. Biotechnol. 22:1161, 2004; Cortez-Retamozo et al., Cancer Res. 64:2853, 2004; Baral et al., Nature Med. 12:580, 2006; and Barthelemy et al., J. Biol. Chem. 283:3639, 2008.

[0332] In particular embodiments, a VL region in a binding domain of the present disclosure is derived from or based on a VL of a known monoclonal antibody and contains one or more (e.g., 2, 3, 4, 5, 6, 7, 8, 9, 10) insertions, one or more (e.g., 2, 3, 4, 5, 6, 7, 8, 9, 10) deletions, one or more (e.g., 2, 3, 4, 5, 6, 7, 8, 9, 10) amino acid substitutions (e.g., conservative amino acid substitutions), or a combination of the above-noted changes, when compared with the VL of the known monoclonal antibody. An insertion, deletion or substitution may be anywhere in the VL region, including at the amino- or carboxy-terminus or both ends of this region, provided that each CDR includes zero changes or at most one, two, or three changes and provided a binding domain containing the modified VL region can still specifically bind its target with an affinity similar to the wild type binding domain.

[0333] In particular embodiments, a binding domain VH region of the present disclosure can be derived from or based on a VH of a known monoclonal antibody and can contain one or more (e.g., 2, 3, 4, 5, 6, 7, 8, 9, 10) insertions, one or more (e.g., 2, 3, 4, 5, 6, 7, 8, 9, 10) deletions, one or more (e.g., 2, 3, 4, 5, 6, 7, 8, 9, 10) amino acid substitutions (e.g., conservative amino acid substitutions or non-conservative amino acid substitutions), or a combination of the above-noted changes, when compared with the VH of a known monoclonal antibody. An insertion, deletion or substitution may be anywhere in the VH region, including at the amino- or carboxy-terminus or both ends of this region, provided that each CDR includes zero changes or at most one, two, or three changes and provided a binding domain containing the modified VH region can still specifically bind its target with an affinity similar to the wild type binding domain.

[0334] In particular embodiments, a binding domain includes or is a sequence that is at least 90%, at least 91%, at least 92%, at least 93%, at least 94%, at least 95%, at least 96%, at least 97%, at least 98%, at least 99%, at least 99.5%, or 100% identical to an amino acid sequence of a light chain variable region (VL) or to a heavy chain variable region (VH), or both, wherein each CDR includes zero changes or at most one, two, or three changes, from a monoclonal antibody or fragment or derivative thereof that specifically binds to a cellular marker of interest.

[0335] An alternative source of binding domains includes sequences that encode random peptide libraries or sequences that encode an engineered diversity of amino acids in loop regions of alternative non-antibody scaffolds, such as single chain (sc) T-cell receptor (scTCR) (see, e.g., Lake et al., Int. Immunol. 11:745, 1999; Maynard et al., J. Immunol. Methods 306:51, 2005; U.S. Pat. No. 8,361,794), fibrinogen domains (see, e.g., Weisel et al., Science 230:1388, 1985), Kunitz domains (see, e.g., U.S. Pat. No. 6,423,498), designed ankyrin repeat proteins (DARPins; Binz et al., J. Mol. Biol. 332:489, 2003 and Binz et al., Nat. Biotechnol. 22:575, 2004), fibronectin binding domains (adnectins or monobodies; Richards et al., J. Mol. Biol. 326:1475, 2003; Parker et al., Protein Eng. Des. Selec. 18:435, 2005 and Hackel et al. (2008) J. Mol. Biol. 381:1238-1252), cysteine-knot miniproteins (Vita et al., 1995, Proc. Nat'l. Acad. Sci. (USA) 92:6404-6408; Martin et al., 2002, Nat. Biotechnol. 21:71, 2002 and Huang et al. (2005) Structure 13:755, 2005), tetratricopeptide repeat domains (Main et al., Structure 11:497, 2003 and Cortajarena et al., ACS Chem. Biol. 3:161, 2008), leucine-rich repeat domains (Stumpp et al., J. Mol. Biol. 332:471, 2003), lipocalin domains (see, e.g., WO 2006/095164, Beste et al., Proc. Nat'l. Acad. Sci. (USA) 96:1898, 1999 and Schonfeld et al., Proc. Nat'l. Acad. Sci. (USA) 106:8198, 2009), V-like domains (see, e.g., US 2007/0065431), C-type lectin domains (Zelensky and Gready, FEBS J. 272:6179, 2005; Beavil et al., Proc. Nat'l. Acad. Sci. (USA) 89:753, 1992 and Sato et al., Proc. Nat'l. Acad. Sci. (USA) 100:7779, 2003), mAb2 or Fc-region with antigen binding domain (Fcab™ (F-Star Biotechnology, Cambridge UK; see, e.g., WO 2007/098934 and WO 2006/072620), armadillo repeat proteins (see, e.g., Madhurantakam et al., Protein Sci. 21: 1015, 2012; WO 2009/040338), affilin (Ebersbach et al., J. Mol. Biol. 372: 172, 2007), affibody, avimers, knottins, fynomers, atrimers, cytotoxic T-lymphocyte associated protein-4 (Weidle et al., Cancer Gen. Proteo. 10:155, 2013), or the like (Nord et al., Protein Eng. 8:601, 1995; Nord et al., Nat. Biotechnol. 15:772, 1997; Nord et al., Euro. J. Biochem. 268:4269, 2001; Binz et al., Nat. Biotechnol. 23:1257, 2005; Boersma and Pluckthun, Curr. Opin. Biotechnol. 22:849, 2011).

[0336] Peptide aptamers include a peptide loop (which is specific for a cellular marker) attached at both ends to a protein scaffold. This double structural constraint increases the binding affinity of peptide aptamers to levels comparable to antibodies. The variable loop length is typically 8 to 20 amino acids and the scaffold can be any protein that is stable, soluble, small, and non-toxic. Peptide aptamer selection can be made using different systems, such as the yeast two-hybrid system (e.g., Gal4 yeast-two-hybrid system), or the LexA interaction trap system.

[0337] In particular embodiments, a binding domain is a scTCR including Vα/β and Cα/β chains (e.g., Vα-Cα, Vβ-Cβ, Vα-Vβ) or including a Vα-Cα, Vβ-Cβ, Vα-Vβ pair specific for a CD33 peptide-MHC complex.

[0338] In particular embodiments, engineered binding domains include Vα, Vβ, Cα, or Cβ regions derived from or based on a Vα, Vβ, Cα, or Cβ and includes one or more (e.g., 2, 3, 4, 5, 6, 7, 8, 9, 10) insertions, one or more (e.g., 2, 3, 4, 5, 6, 7, 8, 9, 10) deletions, one or more (e.g., 2, 3, 4, 5, 6, 7, 8, 9, 10) amino acid substitutions (e.g., conservative amino acid substitutions or non-conservative amino acid substitutions), or a combination of the above-noted changes, when compared with the referenced Vα, Vβ, Cα, or Cβ. An insertion, deletion or substitution may be anywhere in a V_{L}, V_{H}, Vα, Vβ, Cα, or Cβ region, including at the amino- or carboxy-terminus or both ends of these regions, provided that each CDR includes zero changes or at most one, two, or three changes and provides a target binding domain containing a modified Vα, Vβ, Cα, or Cβ region can still specifically bind its target with an affinity and action similar to wild type.

[0339] In particular embodiments, engineered binding domains include a sequence that is at least 90%, at least 91%, at least 92%, at least 93%, at least 94%, at least 95%, at least 96%, at least 97%, at least 98%, at least 99%, at least 99.5%, or 100% identical to an amino acid sequence of a known or identified binding domain, wherein each CDR includes zero changes or at most one, two, or three changes, from a known or identified binding domain or fragment or derivative thereof that specifically binds to the targeted cellular marker.

[0340] The precise amino acid sequence boundaries of a given CDR or FR can be readily determined using any of a number of well-known schemes, including those described by: Kabat et al. (1991) “Sequences of Proteins of Immunological Interest,” 5th Ed. Public Health Service, National Institutes of Health, Bethesda, Md. (Kabat numbering scheme); A1-Lazikani et al. (1997) J Mol Biol 273: 927-948 (Chothia numbering scheme); Maccallum et al. (1996) J Mol Biol 262: 732-745 (Contact numbering scheme); Martin et al. (1989) Proc. Natl. Acad. Sci., 86: 9268-9272 (AbM numbering scheme); Lefranc et al. (2003) Dev Comp Immunol 27(1): 55-77 (IMGT numbering scheme); and Honegger and Pluckthun (2001) J Mol Biol 309(3): 657-670 (“Aho” numbering scheme). The boundaries of a given CDR or FR may vary depending on the scheme used for identification. For example, the Kabat scheme is based on structural alignments, while the Chothia scheme is based on structural information. Numbering for both the Kabat and Chothia schemes is based upon the most common antibody region sequence lengths, with insertions accommodated by insertion letters, for example, “30a,” and deletions appearing in some antibodies. The two schemes place certain insertions and deletions (“indels”) at different positions, resulting in differential numbering. The Contact scheme is based on analysis of complex crystal structures and is similar in many respects to the Chothia numbering scheme. In particular embodiments, the antibody CDR sequences disclosed herein are according to Kabat numbering.

[0341] As indicated, many CD33-targeting agents include linkers. Linkers can be used to achieve different outcomes depending on the particular CD33-targeting agent under consideration. A linker can include any chemical moiety that is capable of linking portions of a CD33-targeting agent. Linkers can be flexible, rigid, or semi-rigid, depending on the desired function of the linker. Examples of anti-CD33 agents that can include a linker include, without limitation, bispecific antibodies.

[0342] For example, in particular embodiments, linkers provide flexibility and room for conformational movement between different components of CD33-targeting agents. Commonly used flexible linkers include linker sequence with the amino acids glycine and serine (Gly-Ser linkers). In particular embodiments, the linker sequence includes sets of glycine and serine repeats such as from one to ten repeats of (GlyₓSer_{y})ₙ, wherein x and y are independently an integer from 0 to 10 provided that x and y are not both 0 and wherein n is an integer of 1, 2, 3, 4, 5, 6, 7, 8, 9 or 10). Particular examples include

(SEQ ID NO: 53)
(Gly4Ser)n,
(SEQ ID NO: 54)
(Gly3Ser)n(Gly4Ser)n,
(SEQ ID NO: 55)
(Gly3Ser)n(Gly2Ser)n,
or
(SEQ ID NO: 56)
(Gly3Ser)n(Gly4Ser)₁.
In particular embodiments, the linker is
(SEQ ID NO: 57)
(Gly4Ser)₄,
(SEQ ID NO: 58)
(Gly4Ser)₃,
(SEQ ID NO: 59)
(Gly4Ser)₂,
(SEQ ID NO: 60)
(Gly4Ser)₁,
(SEQ ID NO: 61)
(Gly3Ser)₂,
(SEQ ID NO: 62)
(Gly3Ser)₁,
(SEQ ID NO: 16)
(Gly2Ser)₂,
(Gly2Ser)₁,
(SEQ ID NO: 63)
GGSGGGSGGSG,
(SEQ ID NO: 64)
GGSGGGSGSG,
or
(SEQ ID NO: 65)
GGSGGGSG.

[0343] In some situations, flexible linkers may be incapable of maintaining a distance or positioning of CD33-targeting agent components needed for a particular use. In these instances, rigid or semi-rigid linkers may be useful. Examples of rigid or semi-rigid linkers include proline-rich linkers. In particular embodiments, a proline-rich linker is a peptide sequence having more proline residues than would be expected based on chance alone. In particular embodiments, a proline-rich linker is one having at least 30%, at least 35%, at least 36%, at least 39%, at least 40%, at least 48%, at least 50%, or at least 51% proline residues. Particular examples of proline-rich linkers include fragments of proline-rich salivary proteins (PRPs).

[0344] Spacer regions are a type of linker region that are used to create appropriate distances and/or flexibility from other linked components. In particular embodiments, the length of a spacer region can be customized for individual cellular markers on unwanted cells to optimize unwanted CD33-expressing cell recognition and destruction. The spacer can be of a length that provides for increased effectiveness of the CD33-targeting agent following CD33 binding, as compared to in the absence of the spacer. In particular embodiments, a spacer region length can be selected based upon the location of a cellular marker epitope, affinity of a binding domain for the epitope, and/or the ability of the CD33-targeting agent to mediate cell destruction following CD33 binding.

[0345] Spacer regions typically include those having 10 to 250 amino acids, 10 to 200 amino acids, 10 to 150 amino acids, 10 to 100 amino acids, 10 to 50 amino acids, or 10 to 25 amino acids. In particular embodiments, a spacer region is 12 amino acids, 20 amino acids, 21 amino acids, 26 amino acids, 27 amino acids, 45 amino acids, or 50 amino acids.

[0346] Exemplary spacer regions include all or a portion of an immunoglobulin hinge region. An immunoglobulin hinge region may be a wild-type immunoglobulin hinge region or an altered wild-type immunoglobulin hinge region. In certain embodiments, an immunoglobulin hinge region is a human immunoglobulin hinge region. As used herein, a “wild type immunoglobulin hinge region” refers to a naturally occurring upper and middle hinge amino acid sequences interposed between and connecting the CH1 and CH2 domains (for IgG, IgA, and IgD) or interposed between and connecting the CH1 and CH3 domains (for IgE and IgM) found in the heavy chain of an antibody.

[0347] An immunoglobulin hinge region may be an IgG, IgA, IgD, IgE, or IgM hinge region. An IgG hinge region may be an IgG1, IgG2, IgG3, or IgG4 hinge region. Sequences from IgG1, IgG2, IgG3, IgG4 or IgD can be used alone or in combination with all or a portion of a CH2 region; all or a portion of a CH3 region; or all or a portion of a CH2 region and all or a portion of a CH3 region.

[0348] Other examples of hinge regions used in fusion binding proteins described herein include the hinge region present in the extracellular regions of type 1 membrane proteins, such as CD8a, CD4, CD28 and CD7, which may be wild-type or variants thereof.

[0349] In particular embodiments, a spacer region includes a hinge region that includes a type II C-lectin interdomain (stalk) region or a cluster of differentiation (CD) molecule stalk region. A “stalk region” of a type II C-lectin or CD molecule refers to the portion of the extracellular domain of the type II C-lectin or CD molecule that is located between the C-type lectin-like domain (CTLD; e.g., similar to CTLD of natural killer cell receptors) and the hydrophobic portion (transmembrane domain). For example, the extracellular domain of human CD94 (GenBank Accession No. AAC50291.1) corresponds to amino acid residues 34-179, but the CTLD corresponds to amino acid residues 61-176, so the stalk region of the human CD94 molecule includes amino acid residues 34-60, which are located between the hydrophobic portion (transmembrane domain) and CTLD (see Boyington et al., Immunity 10:15, 1999; for descriptions of other stalk regions, see also Beavil et al., Proc. Nat'l. Acad. Sci. USA 89:153, 1992; and Figdor et al., Nat. Rev. Immunol. 2:11, 2002). These type II C-lectin or CD molecules may also have junction amino acids (described below) between the stalk region and the transmembrane region or the CTLD. In another example, the 233 amino acid human NKG2A protein (GenBank Accession No. P26715.1) has a hydrophobic portion (transmembrane domain) ranging from amino acids 71-93 and an extracellular domain ranging from amino acids 94-233. The CTLD includes amino acids 119-231 and the stalk region includes amino acids 99-116, which may be flanked by additional junction amino acids. Other type II C-lectin or CD molecules, as well as their extracellular ligand-binding domains, stalk regions, and CTLDs are known in the art (see, e.g., GenBank Accession Nos. NP 001993.2; AAH07037.1; NP 001773.1; AAL65234.1; CAA04925.1; for the sequences of human CD23, CD69, CD72, NKG2A, and NKG2D and their descriptions, respectively).

[0350] In particular embodiments, a spacer region is (GGGGS)n (SEQ ID NO: 53) wherein n is an integer including, 1, 2, 3, 4, 5, 6, 7, 8, 9, or more. In particular embodiments, the spacer region is (EAAAK)n (SEQ ID NO: 66) wherein n is an integer including 1, 2, 3, 4, 5, 6, 7, 8, 9, or more. Junction amino acids can be a short oligo- or protein linker, preferably between 2 and 9 amino acids (e.g., 2, 3, 4, 5, 6, 7, 8, or 9 amino acids) in length to form the linker. In particular embodiments, a glycine-serine doublet can be used as a suitable junction amino acid linker. In particular embodiments, a single amino acid, e.g., an alanine, a glycine, can be used as a suitable junction amino acid.

[0351] Linkers can be susceptible to cleavage (cleavable linker), such as, acid-induced cleavage, photo-induced cleavage, peptidase-induced cleavage, esterase-induced cleavage, and disulfide bond cleavage. Alternatively, linkers can be substantially resistant to cleavage (e.g., stable linker or non-cleavable linker). In some aspects, the linker is a procharged linker, a hydrophilic linker, or a dicarboxylic acid-based linker.

[0352] Anti-CD33 antibody conjugates are artificial molecules that include a molecule conjugated to a CD33 binding domain. Anti-CD33 antibody conjugates include anti-CD33 immunotoxins, ADCs, and radioisotope conjugates.

[0353] Anti-CD33 immunotoxins are artificial molecules that include a toxin linked to a CD33 binding domain. In particular embodiments, immunotoxins selectively deliver an effective dose of a cytotoxin to non-genetically modified CD33-expressing cells.

[0354] To prepare immunotoxins, linker-cytotoxin conjugates can be made by conventional methods analogous to those described by Doronina et al. (Bioconjugate Chem. 17: 114-124, 2006). Immunotoxins containing CD33 binding domains can be prepared by standard methods for cysteine conjugation, such as by methods analogous to that described in Hamblett et al., Clin. Cancer Res. 10:7063-7070, 2004; Doronina et al., Nat. Biotechnol. 21(7): 778-784, 2003; and Francisco et al., Blood 102:1458-1465, 2003.

[0355] Immunotoxins with multiple (e.g., four) cytotoxins per binding domain can be prepared by partial reduction of the binding domain with an excess of a reducing reagent such as dithiothreitol (DTT) or tris(2-carboxyethyl)phosphine (TCEP) at 37° C. for 30 min, then the buffer can be exchanged by elution through SEPHADEX G-25 resin with 1 mM DTPA (diethylene triamine penta-acetic acid) in Dulbecco's phosphate-buffered saline (DPBS). The eluent can be diluted with further DPBS, and the thiol concentration of the binding domain can be measured using 5,5′-dithiobis(2-nitrobenzoic acid) [Ellman's reagent]. An excess, for example 5-fold, of the linker-cytotoxin conjugate can be added at 4° C. for 1 hr, and the conjugation reaction can be quenched by addition of a substantial excess, for example 20-fold, of cysteine. The resulting immunotoxin mixture can be purified on SEPHADEX G-25 equilibrated in PBS to remove unreacted linker-cytotoxin conjugate, desalted if desired, and purified by size-exclusion chromatography. The resulting immunotoxin can then be sterile filtered, for example, through a 0.2 μm filter, and can be lyophilized if desired for storage.

[0356] Frequently used plant toxin drugs are divided into two classes: (1) holotoxins (or class II ribosome inactivating proteins), such as ricin, abrin, mistletoe lectin, and modeccin, and (2) hemitoxins (class I ribosome inactivating proteins), such as pokeweed antiviral protein (PAP), saporin, Bryodin 1, bouganin, and gelonin. Commonly used bacterial toxins include diphtheria toxin (DT) and Pseudomonas exotoxin (PE) (Kreitman, Curr Pharma Biotech 2:313-325, 2001). The toxin may also be an antibody or other peptide. Anti-CD33 ADCs include a CD33 binding domain linked to a cytotoxic drug that results in the bound cell's destruction. ADCs allow for the targeted delivery of a drug moiety to a selected cell, and, in particular embodiments intracellular accumulation therein, where systemic administration of unconjugated drugs may result in unacceptable levels of toxicity to normal cells (Polakis, Curr Op Pharmacol 5:382-387, 2005).

[0357] ADC can include targeted drugs which combine properties of both antibodies and cytotoxic drugs by targeting potent cytotoxic drugs to antigen-expressing cells (Teicher, B. A. (2009) Current Cancer Drug Targets 9:982-1004), thereby enhancing the therapeutic index by maximizing efficacy and minimizing off-target toxicity (Carter & Senter, (2008) The Cancer Jour. 14(3):154-169; Chari, (2008) Acc. Chem. Res. 41:98-107). See also Kamath & Iyer (Pharm Res. 32(11): 3470-3479, 2015), which describes considerations for the development of ADCs.

[0358] ADC compounds of the disclosure include those with anti-CD33 cell activity. In particular embodiments, the ADC compounds include a CD33 binding domain conjugated, i.e. covalently attached, to the drug moiety.

[0359] Examples of drugs useful to include within the ADC format include taxol, taxane, cytochalasin B, gramicidin D, ethidium bromide, emetine, mitomycin, etoposide, tenoposide, vincristine, vinblastine, colchicin, doxorubicin, daunorubicin, dihydroxy anthracinedione, mitoxantrone, mithramycin, actinomycin D, 1-dehydrotestosterone, glucocorticoids, procaine, tetracaine, lidocaine, propranolol, and puromycin and analogs or homologs thereof. Other appropriate toxins include, for example, CC-1065 and analogues thereof, the duocarmycins. Additional examples include maytansinoid (including monomethyl auristatin E [MMAE]; vedotin), dolastatin, auristatin, calicheamicin, pyrrolobenzodiazepine (PBD) dimer, indolino-benzodiazepine dimer, nemorubicin and its derivatives, PNU-159682, anthracycline, vinca alkaloid, trichothecene, camptothecin, elinafide, and stereoisomers, isosteres, analogs, and derivatives thereof that have cytotoxic activity.

[0360] The drug may be obtained from essentially any source; it may be synthetic or a natural product isolated from a selected source, e.g., a plant, bacterial, insect, mammalian or fungal source. The drug may also be a synthetically modified natural product or an analogue of a natural product.

[0361] Exemplary ADCs that target CD33 include GO (which includes the recombinant humanized IgG4 anti-CD33 hP67.6 antibody linked to the cytotoxic antitumor antibiotic calicheamicin; U.S. Pat. No. 5,773,001), lintuzumab (SGN-33; HuM195; Caron et al., Can. Res. 52:6761-6767, 1992), SGN-CD33A (the antibody portion of which is h2H12EC a.k.a h2H12d; see US 2013/0309223), and IMGN779.

[0362] Anti-CD33 antibody-radioisotope conjugates include a CD33 binding domain linked to a cytotoxic radioisotope for use in nuclear medicine. Nuclear medicine refers to the diagnosis and/or treatment of conditions by administering radioactive isotopes (radioisotopes or radionuclides) to a subject. Therapeutic nuclear medicine is often referred to as radiation therapy or radioimmunotherapy (RIT).

[0363] Examples of radioactive isotopes that can be conjugated to CD33 binding domains include iodine-131, indium-111, yttrium-90, and lutetium-177, as well as alpha-emitting radionuclides such as astatine-211 or bismuth-212, bismuth-213, or actinium-225. Methods for preparing radioimmunoconjugates are established in the art. Examples of radioimmunotoxins are commercially available, including Zevalin® (RIT Oncology, Seattle, Wash.), and similar methods can be used to prepare radioimmunotoxins using the binding domains of the disclosure.

[0364] Examples of radionuclides that are useful for radiation therapy include ²²⁵AC and ²²⁷Th. ²²⁵AC is a radionuclide with the half-life of ten days. As ²²⁵AC decays the daughter isotopes ²²¹Fr, ²¹³Bi, and ²⁰⁹Pb are formed. ²²⁷Th has a half-life of 19 days and forms the daughter isotope ²²³Ra.

[0365] Additional examples of useful radioisotopes include ²²⁸Ac, ¹¹¹Ag, ¹²⁴Am, ⁷⁴As, ²⁰⁹At, ¹⁹⁴Au, ¹²⁸Ba, ⁷Be, ²⁰⁶Bi, ²⁴⁶Bk, ²⁴⁶Bk, ⁷⁶Br, ¹¹C, ⁴⁷Ca, ²⁵⁴Cf, ²⁴²Cm, ⁵¹Cr, ⁶⁷Cu, ¹⁵³Dy, ¹⁵⁷Dy, ¹⁵⁹Dy, ¹⁶⁵Dy, ¹⁶⁶Dy, ¹⁷¹Er, ²⁵⁰Es, ²⁵⁴Es, ¹⁴⁷Eu, ¹⁵⁷Eu, ⁵²Fe, ⁵⁹Fe, ²⁵¹Fm, ²⁵²Fm, ²⁵³Fm, ⁶⁶Ga, ⁷²Ga, ¹⁴⁶Gd, ¹⁵³Gd, ⁶⁸Ge, ¹⁷⁰Hf, ¹⁷¹Hf, ¹⁹³Hg, ¹⁹³mHg, ¹⁶⁰mHo, ¹³⁰I, ¹³⁵I, ¹¹⁴mln, ¹⁸⁵Ir, ⁴²K, ⁴³K, ⁷⁶Kr, ⁷⁹Kr, ⁸¹mKr, ¹³²La, ²⁶²Lr, ¹⁶⁹Lu, ¹⁷⁴mLu, ¹⁷⁶mLu, ²⁵⁷Md, ²⁶⁰Md, ²⁸¹Mg, ⁵²¹Mn, ⁹⁰Mo, ²⁴Na, ⁹⁵Nb, ¹³⁸Nd, ⁵⁷Ni, ⁶⁶Ni, ²³⁴Np, ¹⁵O, ¹⁸²Os, ¹⁸⁹mOs, ¹⁹¹Os, ³²P, ²⁰¹Pb, ¹⁰¹Pd, ¹⁴³Pr, ¹⁹¹Pt, ²⁴³Pu, ²²⁵Ra, ⁸¹Rb, ¹⁸⁸Re, ¹⁰⁵Rh, ²¹¹Rn, ¹⁰³Ru, ³⁵S, ⁴⁴Sc, ⁷²Se, ¹⁵³Sm, ¹²⁵Sn, ⁹¹Sr, ¹⁷³Ta, ¹⁵⁴Tb, ¹²⁷Te, ²³⁴Th, ⁴⁵Ti, ¹⁶⁶Tm, ²³⁰U, ²³⁷U, ²⁴⁰U, ⁴⁸V, ¹⁷⁸W, ¹⁸¹W, ¹⁸⁸W, ¹²⁵Xe, ¹²⁷Xe, ¹³³Xe, ¹³³mXe, ¹³⁵Xe, ⁸⁵mY, ⁸⁶Y, ⁹³Y, ¹⁶⁹Yb, ¹⁷⁵Yb, ⁶⁵Zn, ⁷¹mZn, ⁸⁶Zr, ⁹⁵Zr, and/or ⁹⁷Zr.

[0366] In particular embodiments, CD33-targeting agents include bi- or trispecific immune cell engaging antibody constructs. An example of a bi- or trispecific immune cell engaging antibody construct includes those which bind both CD33 and an immune cell (e.g., T-cell) activating epitope, with the goal of bringing immune cells to CD33-expressing cells to destroy the CD33-expressing cells. See, for example, US 2008/0145362. Such constructs are referred to herein as immune-activating bi- or tri-specifics or I-ABTS). In particular embodiments, I-ABTS include AMG330, AMG673, and AMV-564. BiTEs® are one form of I-ABTS. Immune cells that can be targeted for localized activation by I-ABTS within the current disclosure include, for example, T-cells, natural killer (NK) cells, and macrophages which are discussed in more detail herein. Bispecific immune cell engaging antibody constructs, including I-ABTS utilize bispecific binding domains, such as bispecific antibodies to target CD33-expressing cells and immune cells. The binding domain that binds CD33 and the binding domain that binds and activates an immune cell may be joined through a linker, as described elsewhere herein.

[0367] T-cell activation can be mediated by two distinct signals: those that initiate antigen-dependent primary activation and provide a T-cell receptor like signal (primary cytoplasmic signaling sequences) and those that act in an antigen independent manner to provide a secondary or co-stimulatory signal (secondary cytoplasmic signaling sequences). I-ABTS disclosed herein can target any T-cell activating epitope that upon binding induces T-cell activation. Examples of such T-cell activating epitopes are on T-cell markers including CD2, CD3, CD7, CD27, CD28, CD30, CD40, CD83, 4-1BB (CD 137), OX40, lymphocyte function-associated antigen-1 (LFA-1), LIGHT, NKG2C, and B7-H3.

[0368] Several different subsets of T-cells have been discovered, each with a distinct function. For example, a majority of T-cells have a TCR existing as a complex of several proteins. The actual T-cell receptor is composed of two separate peptide chains, which are produced from the independent T-cell receptor α and β (TCRα and TCRρ) genes and are called α- and β-TCR chains.

[0369] CD3 is a primary signal transduction element of T-cell receptors. CD3 is composed of a group of invariant proteins called gamma (γ), delta (δ), epsilon (ε), zeta (ζ) and eta (η) chains. The γ, δ, and ε chains are structurally-related, each containing an Ig-like extracellular constant domain followed by a transmembrane region and a cytoplasmic domain of more than 40 amino acids. The ζ and η chains have a distinctly different structure: both have a very short extracellular region of only 9 amino acids, a transmembrane region and a long cytoplasmic tail including 113 and 115 amino acids in the and q chains, respectively. The invariant protein chains in the CD3 complex associate to form noncovalent heterodimers of the ε chain with a γ chain (εγ) or with a δ chain (εδ) or of the ζ and η chain (ζη), or a disulfide-linked homodimer of two ζ chains (ζζ). 90% of the CD3 complex incorporate the ζζ homodimer.

[0370] The cytoplasmic regions of the CD3 chains include a motif designated the immunoreceptor tyrosine-based activation motif (ITAM). This motif is found in a number of other receptors including the Ig-α/Ig-β heterodimer of the B-cell receptor complex and Fc receptors for IgE and IgG. The ITAM sites associate with cytoplasmic tyrosine kinases and participate in signal transduction following TCR-mediated triggering. In CD3, the γ, δ and ε chains each contain a single copy of ITAM, whereas the ζ and η chains harbor three ITAMs in their long cytoplasmic regions. Indeed, the ζ and η chains have been ascribed a major role in T-cell activation signal transduction pathways.

[0371] In particular embodiments, the CD3 binding domain (e.g., scFv) of an I-ABTS is derived from the OKT3 antibody (also utilized in blinatumomab). The OKT3 antibody is described in detail in U.S. Pat. No. 5,929,212. It includes a variable light chain including a CDRL1 sequence including SASSSVSYMN (SEQ ID NO: 67), a CDRL2 sequence including RWIYDTSKLAS (SEQ ID NO: 68), and a CDRL3 sequence including QQWSSNPFT (SEQ ID NO: 69). In particular embodiments, the CD3 T-cell activating epitope binding domain is a human or humanized binding domain (e.g., scFv) including a variable heavy chain including a CDRH1 sequence including KASGYTFTRYTMH (SEQ ID NO: 70), a CDRH2 sequence including INPSRGYTNYNQKFKD (SEQ ID NO: 71), and a CDRH3 sequence including YYDDHYCLDY (SEQ ID NO: 72).

[0372] The following sequence is an scFv derived from OKT3 which retains the capacity to bind CD3:

(SEQ ID NO: 73)
QVQLQQSGAELARPGASVKMSCKASGYTFTRYTMHWVKQRPGQGLEWIG
YINPSRGYTNYNQKFKDKATLTTDKSSSTAYMQLSSLTSEDSAVYYCAR
YYDDHYCLDYWGQGTTLTVSSSGGGGSGGGGSGGGGSQIVLTQSPAIMS
ASPGEKVTMTCSASSSVSYMNWYQQKSGTSPKRWIYDTSKLASGVPAHF
RGSGSGTSYSLTISGMEAEDAATYYCQQWSSNPFTFGSGTKLEINR.

[0373] It may also be used as a CD3 binding domain.

[0374] In particular embodiments, the CD3 T-cell activating epitope binding domain is a human or humanized binding domain (e.g., scFv) including a variable light chain including a CDRL1 sequence including QSLVHNNGNTY (SEQ ID NO: 74), a CDRL2 sequence including KVS, and a CDRL3 sequence including GQGTQYPFT (SEQ ID NO: 75). In particular embodiments, the CD3 T-cell activating epitope binding domain is a human or humanized binding domain (e.g., scFv) including a variable heavy chain including a CDRH1 sequence including GFTFTKAW (SEQ ID NO: 76), a CDRH2 sequence including IKDKSNSYAT (SEQ ID NO: 77), and a CDRH3 sequence including RGVYYALSPFDY (SEQ ID NO: 78). These reflect CDR sequences of the 20G6-F3 antibody.

[0375] In particular embodiments, the CD3 T-cell activating epitope binding domain is a human or humanized binding domain (e.g., scFv) including a variable light chain including a CDRL1 sequence including QSLVHDNGNTY (SEQ ID NO: 79), a CDRL2 sequence including KVS, and a CDRL3 sequence including GQGTQYPFT (SEQ ID NO: 75). In particular embodiments, the CD3 T-cell activating epitope binding domain is a human or humanized binding domain (e.g., scFv) including a variable heavy chain including a CDRH1 sequence including GFTFSNAW (SEQ ID NO: 81), a CDRH2 sequence including IKARSNNYAT (SEQ ID NO: 82), and a CDRH3 sequence including RGTYYASKPFDY (SEQ ID NO: 83). These reflect CDR sequences of the 4B4-D7 antibody.

[0376] In particular embodiments, the CD3 T-cell activating epitope binding domain is a human or humanized binding domain (e.g., scFv) including a variable light chain including a CDRL1 sequence including QSLEHNNGNTY (SEQ ID NO: 84), a CDRL2 sequence including KVS, and a CDRL3 sequence including GQGTQYPFT (SEQ ID NO: 75). In particular embodiments, the CD3 T-cell activating epitope binding domain is a human or humanized binding domain (e.g., scFv) including a variable heavy chain including a CDRH1 sequence including GFTFSNAW (SEQ ID NO: 81), a CDRH2 sequence including IKDKSNNYAT (SEQ ID NO: 87), and a CDRH3 sequence including RYVHYGIGYAMDA (SEQ ID NO: 88). These reflect CDR sequences of the 4E7-C9 antibody.

[0377] In particular embodiments, the CD3 T-cell activating epitope binding domain is a human or humanized binding domain (e.g., scFv) including a variable light chain including a CDRL1 sequence including QSLVHTNGNTY (SEQ ID NO: 89), a CDRL2 sequence including KVS, and a CDRL3 sequence including GQGTHYPFT (SEQ ID NO: 90). In particular embodiments, the CD3 T-cell activating epitope binding domain is a human or humanized binding domain (e.g., scFv) including a variable heavy chain including a CDRH1 sequence including GFTFTNAW (SEQ ID NO: 91), a CDRH2 sequence including KDKSNNYAT (SEQ ID NO: 92), and a CDRH3 sequence including RYVHYRFAYALDA (SEQ ID NO: 93). These reflect CDR sequences of the 18F5-H10 antibody.

[0378] Additional examples of anti-CD3 antibodies, binding domains, and CDRs can be found in WO2016/116626. TR66 may also be used. WO 2015/036583 describes a bispecific antibody construct that binds to CD33 and CD3.

[0379] CD28 is a surface glycoprotein present on 80% of peripheral T-cells in humans and is present on both resting and activated T-cells. CD28 binds to B7-1 (CD80) and B7-2 (CD86) and is the most potent of the known co-stimulatory molecules (June et al., Immunol. Today 15:321, 1994; Linsley et al., Ann. Rev. Immunol. 11:191, 1993). In particular embodiments, the CD28 binding domain (e.g., scFv) is derived from CD80, CD86 or the 9D7 antibody. Additional antibodies that bind CD28 include 9.3, KOLT-2, 15E8, 248.23.2, and EX5.3D10. Further, 1YJD provides a crystal structure of human CD28 in complex with the Fab fragment of a mitogenic antibody (5.11A1). In particular embodiments, antibodies that do not compete with 9D7 are selected.

[0380] In particular embodiments, a CD28 binding domain is derived from TGN1412. In particular embodiments, the variable heavy chain of TGN1412 includes:

(SEQ ID NO: 94)
QVQLVQSGAEVKKPGASVKVSCKASGYTFTSYYIHWVRQAPGQGLEWIGC
IYPGNVNTNYNEKFKDRATLTVDTSISTAYMELSRLRSDDTAVYFCTRSH
YGLDWNFDVWGQGTTVTVSS

[0381] and the variable light chain of TGN1412 includes:

(SEQ ID NO: 95)
DIQMTQSPSSLSASVGDRVTITCHASQNIYVWLNWYQQKPGKAPKLLIY
KASNLHTGVPSRFSGSGSGTDFTLTISSLQPEDFATYYCQQGQTYPYTF
GGGTKVEIK.

[0382] In particular embodiments, the CD28 binding domain includes a variable light chain including a CDRL1 sequence including HASQNIYVWLN (SEQ ID NO: 96), CDRL2 sequence including KASNLHT (SEQ ID NO: 97), and CDRL3 sequence including QQGQTYPYT (SEQ ID NO: 98), a variable heavy chain including a CDRH1 sequence including GYTFTSYYIH (SEQ ID NO: 99), a CDRH2 sequence including CIYPGNVNTNYNEK (SEQ ID NO: 100), and a CDRH3 sequence including SHYGLDWNFDV (SEQ ID NO: 101).

[0383] In particular embodiments, the CD28 binding domain including a variable light chain including a CDRL1 sequence including HASQNIYVWLN (SEQ ID NO: 96), a CDRL2 sequence including KASNLHT (SEQ ID NO: 97), and a CDRL3 sequence including QQGQTYPYT (SEQ ID NO: 98) and a variable heavy chain including a CDRH1 sequence including SYYIH (SEQ ID NO: 105), a CDRH2 sequence including CIYPGNVNTNYNEKFKD (SEQ ID NO: 106), and a CDRH3 sequence including SHYGLDWNFDV (SEQ ID NO: 101).

[0384] In particular embodiments, activated T-cells express 4-1BB (CD137). In particular embodiments, the 4-1 BB binding domain includes a variable light chain including a CDRL1 sequence including RASQSVS (SEQ ID NO: 108), a CDRL2 sequence including ASNRAT (SEQ ID NO: 109), and a CDRL3 sequence including QRSNWPPALT (SEQ ID NO: 110) and a variable heavy chain including a CDRH1 sequence including YYWS (SEQ ID NO: 111), a CDRH2 sequence including INH, and a CDRH3 sequence including YGPGNYDWYFDL (SEQ ID NO: 112).

[0385] In particular embodiments, the 4-1BB binding domain includes a variable light chain including a CDRL1 sequence including SGDNIGDQYAH (SEQ ID NO: 113), a CDRL2 sequence including QDKNRPS (SEQ ID NO: 114), and a CDRL3 sequence including ATYTGFGSLAV (SEQ ID NO: 115) and a variable heavy chain including a CDRH1 sequence including GYSFSTYWIS (SEQ ID NO: 116), a CDRH2 sequence including KIYPGDSYTNYSPS (SEQ ID NO: 117) and a CDRH3 sequence including GYGIFDY (SEQ ID NO: 118).

[0386] Particular embodiments disclosed herein include immune cell binding domains that bind epitopes on CD8. In particular embodiments, the CD8 binding domain (e.g., scFv) is derived from the OKT8 antibody. For example, in particular embodiments, the CD8 T-cell activating epitope binding domain is a human or humanized binding domain (e.g., scFv) including a variable light chain including a CDRL1 sequence including RTSRSISQYLA (SEQ ID NO: 119), a CDRL2 sequence including SGSTLQS (SEQ ID NO: 120), and a CDRL3 sequence including QQHNENPLT (SEQ ID NO: 121). In particular embodiments, the CD8 T-cell activating epitope binding domain is a human or humanized binding domain (e.g., scFv) including a variable heavy chain including a CDRH1 sequence including GFNIKD (SEQ ID NO: 122), a CDRH2 sequence including RIDPANDNT (SEQ ID NO: 123), and a CDRH3 sequence including GYGYYVFDH (SEQ ID NO: 124). These reflect CDR sequences of the OKT8 antibody.

[0387] In particular embodiments, an immune cell binding domain is a scTCR including V_{α/β} and C_{α/β} chains (e.g., V_{α}-C_{α}, V_{β}-C_{β}, V_{α}-V_{β}) or including V_{α}-C_{α}, V_{β}-C_{β}, V_{α}-V_{β} pair specific for a target epitope of interest. In particular embodiments, T-cell activating epitope binding domains can be derived from or based on a Vα, Vβ, Cα, or Cβ of a known TCR (e.g., a high-affinity TCR).

[0388] In particular embodiments, natural killer cells (also known as NK cells, K cells, and killer cells) are activated in response to interferons or macrophage-derived cytokines. They serve to contain viral infections while the adaptive immune response is generating antigen-specific cytotoxic T cells that can clear the infection. NK cells express CD8, CD16 and CD56 but do not express CD3.

[0389] In particular embodiments NK cells are targeted for localized activation by I-ABTS. NK cells can induce apoptosis or cell lysis by releasing granules that disrupt cellular membranes and can secrete cytokines to recruit other immune cells.

[0390] Examples of activating proteins expressed on the surface of NK cells include NKG2D, CD8, CD16, KIR2DL4, KIR2DS1, KIR2DS2, KIR3DS1, NKG2C, NKG2E, NKG2D, and several members of the natural cytotoxicity receptor (NCR) family. Examples of NCRs that activate NK cells upon ligand binding include NKp30, NKp44, NKp46, NKp80, and DNAM-1.

[0391] Examples of commercially available antibodies that bind to an NK cell receptor and induce and/or enhance activation of NK cells include: 5C6 and 1 D11, which bind and activate NKG2D (available from BioLegend® San Diego, Calif.); mAb 33, which binds and activates KIR2DL4 (available from BioLegend®); P44-8, which binds and activates NKp44 (available from BioLegend®); SK1, which binds and activates CD8; and 3G8 which binds and activates CD16.

[0392] In particular embodiments, the I-ABTS can bind to and block an NK cell inhibitory receptor to enhance NK cell activation. Examples of NK cell inhibitory receptors that can be bound and blocked include KIR2DL1, KIR2DL2/3, KIR3DL1, NKG2A, and KLRG1. In particular embodiments, a binding domain that binds and blocks the NK cell inhibitory receptors KIR2DL1 and KIR2DL2/3 includes a variable light chain region of the sequence:

(SEQ ID NO: 125)
EIVLTQSPVTLSLSPGERATLSCRASQSVSSYLAWYQQKPGQAPRLLIY
DASNRATGIPARFSGSGSGTDFTLTISSLEPEDFAVYYCQQRSNWMYTF
GQGTKLEIKRT

[0393] and a variable heavy chain region of the sequence:

(SEQ ID NO: 126)
QVQLVQSGAEVKKPGSSVKVSCKASGGTFSFYAISWVRQAPGQGLEWMG
GFIPIFGAANYAQKFQGRVTITADESTSTAYMELSSLRSDDTAVYYCAR
IPSGSYYYDYDMDVWGQGTTVTVSS.

[0394] Additional NK cell activating antibodies are described in WO2005/0003172 and U.S. Pat. No. 9,415,104.

[0395] Macrophages (and their precursors, monocytes) reside in every tissue of the body (in certain instances as microglia, Kupffer cells and osteoclasts) where they can engulf apoptotic cells, pathogens and other non-self-components.

[0396] The I-ABTS can be designed to bind to a protein expressed on the surface of macrophages. Examples of activating proteins expressed on the surface of macrophages (and their precursors, monocytes) include CD11b, CD11c, CD64, CD68, CD119, CD163, CD206, CD209, F4/80, IFGR2, Toll-like receptors (TLRs) 1-9, IL-4Ra, and MARCO. Commercially available antibodies that bind to proteins expressed on the surface of macrophages include M1/70, which binds and activates CD11 b (available from BioLegend); KP1, which binds and activates CD68 (available from ABCAM, Cambridge, United Kingdom); and ab87099, which binds and activates CD163 (available from ABCAM).

[0397] In particular embodiments, anti-CD33 tri-specific antibodies are artificial proteins that simultaneously bind to three different types of antigens, wherein at least one of the antigens is CD33. Tri-specific antibodies are described in, for example, WO2016/105450, WO 2010/028796; WO 2009/007124; WO 2002/083738; US 2002/0051780; and WO 2000/018806.

[0398] When CD33-targeting agents are based on antibodies, binding domains, or similar proteins derived therefrom, modifications that provide different administration benefits can be useful. Exemplary administration benefits can include (1) reduced susceptibility to proteolysis, (2) reduced susceptibility to oxidation, (3) altered binding affinity for forming protein complexes, (4) altered binding affinities, (5) reduced immunogenicity; and/or (6) extended half-live. While the present disclosure describes these modifications in terms of their application to antibodies, when applicable to another particular anti-CD33 binding domain format (e.g., an scFv, bispecific antibodies), the modifications can also be applied to these other formats.

[0399] In particular embodiments antibodies can be mutated to increase the half-life of the antibodies in serum. M428L/N434S is a pair of mutations that increase the half-life of antibodies in serum, as described in Zalevsky et al., Nature Biotechnology 28, 157-159, 2010.

[0400] In particular embodiments antibodies can be mutated to increase their affinity for Fc receptors. Exemplary mutations that increase the affinity for Fc receptors include: G236A/S239D/A330L/I332E (GASDALIE). Smith et al., Proceedings of the National Academy of Sciences of the United States of America, 109(16), 6181-6186, 2012. In particular embodiments, an antibody variant includes an Fc region with one or more amino acid substitutions which improve ADCC, e.g., substitutions at positions 298, 333, and/or 334 of the Fc region (EU numbering of residues). In particular embodiments, alterations are made in the Fc region that result in altered Clq binding and/or Complement Dependent Cytotoxicity (CDC), e.g., as described in U.S. Pat. No. 6,194,551, WO 99/51642, and Idusogie et al., J. Immunol. 164: 4178-4184, 2000.

[0401] Antibody variants are provided having a carbohydrate structure that lacks fucose attached (directly or indirectly) to an Fc region. For example, the amount of fucose in such antibody may be from 1% to 80%, from 1% to 65%, from 5% to 65% or from 20% to 40%. The amount of fucose is determined by calculating the average amount of fucose within the sugar chain at Asn297, relative to the sum of all glycostructures attached to Asn 297 (e.g. complex, hybrid and high mannose structures) as measured by MALDI-TOF mass spectrometry, as described in WO 2008/077546, for example. Asn297 refers to the asparagine residue located at position 297 in the Fc region (Eu numbering of Fc region residues); however, Asn297 may also be located ±3 amino acids upstream or downstream of position 297, i.e., between positions 294 and 300, due to minor sequence variations in antibodies. Such fucosylation variants may have improved ADCC function. See, e.g., WO2000/61739; WO 2001/29246; WO2002/031140; US2002/0164328; WO2003/085119; WO2003/084570; US2003/0115614; US2003/0157108; US2004/0093621; US2004/0110704; US2004/0132140; US2004/0110282; US2004/0109865; WO2005/035586; WO2005/035778; WO2005/053742; Okazaki et al. J. Mol. Biol. 336:1239-1249 (2004); and Yamane-Ohnuki et al. Biotech. Bioeng. 87: 614 (2004). Examples of cell lines capable of producing defucosylated antibodies include Lec13 CHO cells deficient in protein fucosylation (Ripka et al. Arch. Biochem. Biophys. 249:533-545, 1986, and knockout cell lines, such as alpha-1,6-fucosyltransferase gene, FUT8, knockout CHO cells (see, e.g., Yamane-Ohnuki et al., Biotech. Bioeng. 87: 614, 2004; Kanda et al., Biotechnol. Bioeng., 94(4):680-688, 2006; and WO2003/085107).

[0402] In particular embodiments, modified antibodies include those wherein one or more amino acids have been replaced with a non-amino acid component, or where the amino acid has been conjugated to a functional group or a functional group has been otherwise associated with an amino acid. The modified amino acid may be, e.g., a glycosylated amino acid, a PEGylated amino acid, a farnesylated amino acid, an acetylated amino acid, a biotinylated amino acid, an amino acid conjugated to a lipid moiety, or an amino acid conjugated to an organic derivatizing agent. Amino acid(s) can be modified, for example, co-translationally or post-translationally during recombinant production (e.g., N-linked glycosylation at N-X-S/T motifs during expression in mammalian cells) or modified by synthetic means. The modified amino acid can be within the sequence or at the terminal end of a sequence. Modifications also include nitrited constructs.

[0403] PEGylation particularly is a process by which polyethylene glycol (PEG) polymer chains are covalently conjugated to other molecules such as proteins. Several methods of PEGylating proteins have been reported in the literature. For example, N-hydroxy succinimide (NHS)-PEG was used to PEGylate the free amine groups of lysine residues and N-terminus of proteins; PEGs bearing aldehyde groups have been used to PEGylate the amino-termini of proteins in the presence of a reducing reagent; PEGs with maleimide functional groups have been used for selectively PEGylating the free thiol groups of cysteine residues in proteins; and site-specific PEGylation of acetyl-phenylalanine residues can be performed.

[0404] Covalent attachment of proteins to PEG has proven to be a useful method to increase the half-lives of proteins in the body (Abuchowski, A. et al., Cancer Biochem. Biophys., 1984, 7:175-186; Hershfield, M. S. et al., N. Engl. J. Medicine, 1987, 316:589-596; and Meyers, F. J. et al., Clin. Pharmacol. Ther., 49:307-313, 1991). The attachment of PEG to proteins not only protects the molecules against enzymatic degradation, but also reduces their clearance rate from the body. The size of PEG attached to a protein has significant impact on the half-life of the protein. The ability of PEGylation to decrease clearance is generally not a function of how many PEG groups are attached to the protein, but the overall molecular weight of the altered protein. Usually the larger the PEG is, the longer the in vivo half-life of the attached protein. In addition, PEGylation can also decrease protein aggregation (Suzuki et al., Biochem. Bioph. Acta 788:248, 1984), alter protein immunogenicity (Abuchowski et al., J. Biol. Chem. 252: 3582, 1977), and increase protein solubility as described, for example, in PCT Publication No. WO 92/16221).

[0405] Several sizes of PEGs are commercially available (Nektar Advanced PEGylation Catalog 2005-2006; and NOF DDS Catalogue Ver 7.1), which are suitable for producing proteins with targeted circulating half-lives. A variety of active PEGs have been used including mPEG succinimidyl succinate, mPEG succinimidyl carbonate, and PEG aldehydes, such as mPEG-propionaldehyde.

[0406] CD33-targeting agents also include immune cells expressing CARs or TCRs that specifically bind CD33. Methods to genetically modify cells to express an exogenous gene are described above in section (IV).

[0407] CAR refer to proteins including several distinct subcomponents. The subcomponents include at least an extracellular component, a transmembrane domain, and an intracellular component. Within the current disclosure, the extracellular component includes a binding domain that binds CD33. When the binding domain binds CD33, the intracellular component signals the immune cell to destroy the bound cell. Binding domains that specifically bind CD33 are described above.

[0408] In various embodiments, intracellular or otherwise the cytoplasmic signaling components of a CAR are responsible for activation of the cell in which the CAR is expressed. The term “intracellular signaling components” or “intracellular components” is thus meant to include any portion of the intracellular domain sufficient to transduce an activation signal. Intracellular components of expressed CAR can include effector domains. An effector domain is an intracellular portion of a fusion protein or receptor that can directly or indirectly promote a biological or physiological response in a cell when receiving the appropriate signal. In certain embodiments, an effector domain is part of a protein or protein complex that receives a signal when bound, or it binds directly to a target molecule, which triggers a signal from the effector domain. An effector domain may directly promote a cellular response when it contains one or more signaling domains or motifs, such as an immunoreceptor tyrosine-based activation motif (ITAM). In other embodiments, an effector domain will indirectly promote a cellular response by associating with one or more other proteins that directly promote a cellular response, such as co-stimulatory domains.

[0409] Effector domains can provide for activation of at least one function of a modified cell upon binding to the cellular marker expressed by a CD33-expressing cell. Activation of the modified cell can include one or more of differentiation, proliferation and/or activation or other effector functions. In particular embodiments, an effector domain can include an intracellular signaling component including a T cell receptor and a co-stimulatory domain which can include the cytoplasmic sequence from a co-receptor or co-stimulatory molecule.

[0410] An effector domain can include one, two, three or more receptor signaling domains, intracellular signaling components (e.g., cytoplasmic signaling sequences), co-stimulatory domains, or combinations thereof. Exemplary effector domains include signaling and stimulatory domains selected from: 4-1BB (CD137), CARD11, CD3γ, CD3δ, CD3ε, CD3ζ, CD27, CD28, CD79A, CD79B, DAP10, FcRα, FcRβ (FcεR1b), FcRγ, Fyn, HVEM (LIGHTR), ICOS, LAGS, LAT, Lck, LRP, NKG2D, NOTCH1, pTα, PTCH2, OX40, ROR2, Ryk, SLAMF1, Slp76, TCRα, TCRβ, TRIM, Wnt, Zap70, or any combination thereof. In particular embodiments, exemplary effector domains include signaling and co-stimulatory domains selected from: CD86, FcγRIIa, DAP12, CD30, CD40, PD-1, lymphocyte function-associated antigen-1 (LFA-1), CD2, CD7, LIGHT, NKG2C, B7-H3, a ligand that specifically binds with CD83, CDS, ICAM-1, GITR, BAFFR, SLAMF7, NKp80 (KLRF1), CD127, CD160, CD19, CD4, CD8α, CD8β, IL2Rβ, IL2Rγ, IL7Rα, ITGA4, VLA1, CD49a, IA4, CD49D, ITGA6, VLA-6, CD49f, ITGAD, CD11d, ITGAE, CD103, ITGAL, CD11a, ITGAM, CD11b, ITGAX, CD11c, ITGB1, CD29, ITGB2, CD18, ITGB7, TNFR2, TRANCE/RANKL, DNAM1 (CD226), SLAMF4 (CD244, 2B4), CD84, CD96 (Tactile), CEACAM1, CRTAM, Ly9 (CD229), PSGL1, CD100 (SEMA4D), CD69, SLAMF6 (NTB-A, Ly108), SLAM (CD150, IPO-3), BLAME (SLAMF8), SELPLG (CD162), LTBR, GADS, PAG/Cbp, NKp44, NKp30, or NKp46.

[0411] Intracellular signaling component sequences that act in a stimulatory manner may include iTAMs. Examples of iTAMs including primary cytoplasmic signaling sequences include those derived from CD3γ, CD3δ, CD3ε, CD3ζ, CD5, CD22, CD66d, CD79a, CD79b, and common FcRγ (FCER1 G), FcγRIIa, FcRβ (Fcε Rib), DAP10, and DAP12. In particular embodiments, variants of CD3 retain at least one, two, three, or all ITAM regions.

[0412] Additional examples of intracellular signaling components include the cytoplasmic sequences of the CD3ζ chain, and/or co- receptors that act in concert to initiate signal transduction following binding domain engagement.

[0413] A co-stimulatory domain is a domain whose activation can be required for an efficient lymphocyte response to cellular marker binding. Some molecules are interchangeable as intracellular signaling components or co-stimulatory domains. Examples of costimulatory domains include CD27, CD28, 4-1BB (CD 137), OX40, CD30, CD40, PD-1, ICOS, lymphocyte function-associated antigen-1 (LFA-1), CD2, CD7, LIGHT, NKG2C, B7-H3, and a ligand that specifically binds with CD83. Further examples of such co-stimulatory domain molecules include CDS, ICAM-1, GITR, BAFFR, HVEM (LIGHTR), SLAMF7, NKp80 (KLRF1), NKp44, NKp30, NKp46, CD160, CD19, CD4, CD8a, CD8β, IL2Rβ, IL2Rγ, IL7Rα, ITGA4, VLA1, CD49a, ITGA4, IA4, CD49D, ITGA6, VLA-6, CD49f, ITGAD, CDlld, ITGAE, CD103, ITGAL, CDlla, ITGAM, CDI Ib, ITGAX, CDllc, ITGBI, CD29, ITGB2, CD18, ITGB7, TNFR2, TRANCE/RANKL, DNAM1 (CD226), SLAMF4 (CD244, 2B4), CD84, CD96 (Tactile), NKG2D, CEACAM1, CRTAM, Ly9 (CD229), PSGL1, CD100 (SEMA4D), CD69, SLAMF6 (NTB-A, LyI08), SLAM (SLAMF1, CD150, IPO-3), BLAME (SLAMF8), SELPLG (CD162), LTBR, LAT, GADS, SLP-76, PAG/Cbp, and CD19a.

[0414] In particular embodiments, the intracellular signaling component includes (i) all or a portion of the signaling domain of CD3, (ii) all or a portion of the signaling domain of 4-1BB, or (iii) all or a portion of the signaling domain of CD3 and 4-1BB.

[0415] Intracellular components may also include one or more of a protein of a Wnt signaling pathway (e.g., LRP, Ryk, or ROR2), NOTCH signaling pathway (e.g., NOTCH1, NOTCH2, NOTCH3, or NOTCH4), Hedgehog signaling pathway (e.g., PTCH or SMO), receptor tyrosine kinases (RTKs) (e.g., epidermal growth factor (EGF) receptor family, fibroblast growth factor (FGF) receptor family, hepatocyte growth factor (HGF) receptor family, insulin receptor (IR) family, platelet-derived growth factor (PDGF) receptor family, vascular endothelial growth factor (VEGF) receptor family, tropomycin receptor kinase (Trk) receptor family, ephrin (Eph) receptor family, AXL receptor family, leukocyte tyrosine kinase (LTK) receptor family, tyrosine kinase with immunoglobulin-like and EGF-like domains 1 (TIE) receptor family, receptor tyrosine kinase-like orphan (ROR) receptor family, discoidin domain (DDR) receptor family, rearranged during transfection (RET) receptor family, tyrosine-protein kinase-like (PTK7) receptor family, related to receptor tyrosine kinase (RYK) receptor family, or muscle specific kinase (MuSK) receptor family); G-protein-coupled receptors, GPCRs (Frizzled or Smoothened); serine/threonine kinase receptors (BMPR or TGFR); or cytokine receptors (ID R, IL2R, IL7R, or IL15R).

[0416] In particular embodiments, transmembrane domains within a CAR molecule connect the extracellular component and intracellular component through the cell membrane. The transmembrane domain can anchor the expressed molecule in the modified cell's membrane.

[0417] A transmembrane domain can be derived either from a natural and/or a synthetic source. When the source is natural, the transmembrane domain can be derived from any membrane-bound or transmembrane protein. Transmembrane domains can include at least the transmembrane region(s) of the α, β or ζ chain of a T-cell receptor, CD28, CD27, CD3 epsilon, CD45, CD4, CD5, CD8, CD9, CD16, CD22; CD33, CD37, CD64, CD80, CD86, CD134, CD137 and CD154. In particular embodiments, a transmembrane domain may include at least the transmembrane region(s) of, e.g., KIRDS2, OX40, CD2, CD27, LFA-1 (CD 11a, CD18), ICOS (CD278), 4-1BB (CD137), GITR, CD40, BAFFR, HVEM (LIGHTR), SLAMF7, NKp80 (KLRF1), NKp44, NKp30, NKp46, CD160, CD19, IL2Rβ, IL2Rγ, IL7R a, ITGA1, VLA1, CD49a, ITGA4, IA4, CD49D, ITGA6, VLA-6, CD49f, ITGAD, CDI Id, ITGAE, CD103, ITGAL, CDI la, ITGAM, CDI Ib, ITGAX, CDI Ic, ITGB1, CD29, ITGB2, CD18, ITGB7, TNFR2, DNAM1(CD226), SLAMF4 (CD244, 2B4), CD84, CD96 (Tactile), CEACAM1, CRT AM, Ly9(CD229), PSGL1, CD100 (SEMA4D), SLAMF6 (NTB-A, Lyl08), SLAM (SLAMF1, CD150, IPO-3), BLAME (SLAMF8), SELPLG (CD162), LTBR, PAG/Cbp, NKG2D, or NKG2C. In particular embodiments, a variety of human hinges can be employed as well including the human Ig (immunoglobulin) hinge (e.g., an IgG4 hinge, an IgD hinge), a GS linker (e.g., a Gly-Ser linker such as those described herein), a KIR2DS2 hinge or a CD8a hinge.

[0418] In particular embodiments, a transmembrane domain has a three-dimensional structure that is thermodynamically stable in a cell membrane, and generally ranges in length from 15 to 30 amino acids. The structure of a transmembrane domain can include an α helix, a β barrel, a β sheet, a β helix, or any combination thereof.

[0419] A transmembrane domain can include one or more additional amino acids adjacent to the transmembrane region, e.g., one or more amino acid within the extracellular region of the CAR (e.g., up to 15 amino acids of the extracellular region) and/or one or more additional amino acids within the intracellular region of the CAR (e.g., up to 15 amino acids of the intracellular components). In one aspect, the transmembrane domain is from the same protein that the signaling domain, co-stimulatory domain or the hinge domain is derived from. In another aspect, the transmembrane domain is not derived from the same protein that any other domain of the CAR is derived from. In some instances, the transmembrane domain can be selected or modified by amino acid substitution to avoid and/or reduce binding of such domains to the transmembrane domains of the same or different surface membrane proteins to minimize interactions with other unintended members of the receptor complex. In one aspect, the transmembrane domain is capable of homodimerization with another CAR on the cell surface of a CAR-expressing cell. In a different aspect, the amino acid sequence of the transmembrane domain may be modified or substituted so as to minimize interactions with the binding domains of the native binding partner present in the same CAR-expressing cell.

[0420] CARs and TCRs expressed by genetically modified immune cells often additionally include spacer regions. Spacer regions can position the binding domain away from the immune cell (e.g., T cell) surface to enable proper cell/cell contact, antigen binding and activation (Patel et al., Gene Therapy 6: 412-419, 1999). As indicated, an extracellular spacer region of a fusion binding protein is generally located between a hydrophobic portion or transmembrane domain and the extracellular binding domain, and the spacer region length may be varied to maximize antigen recognition (e.g., tumor recognition) based on the selected target molecule, selected binding epitope, or antigen-binding domain size and affinity (see, e.g., Guest et al., J. Immunother. 28:203-11, 2005; WO 2014/031687). Junction amino acids can be a linker which can be used to connect the sequences of CAR domains when the distance provided by a spacer is not needed and/or wanted. Junction amino acids are short amino acid sequences that can be used to connect co-stimulatory intracellular signaling components. In particular embodiments, junction amino acids are 9 amino acids or less.

[0421] Exemplary methods to produce CD33 CAR T-cells are described in WO2018/US34743.

[0422] In particular embodiments, cells genetically modified to express a CAR or TCR can additionally express one or more tag cassettes, transduction markers, and/or suicide switches. In some embodiments, the transduction marker and/or suicide switch is within the same construct but is expressed as a separate molecule on the cell surface. Tag cassettes and transduction markers can be used to activate, promote proliferation of, detect, enrich for, isolate, track, deplete and/or eliminate cells genetically modified to express a CAR or TCR in vitro, in vivo and/or ex vivo. “Tag cassette” refers to a unique synthetic peptide sequence affixed to, fused to, or that is part of a CD33-targeting agent, to which a cognate binding molecule (e.g., ligand, antibody, or other binding partner) is capable of specifically binding where the binding property can be used to activate, promote proliferation of, detect, enrich for, isolate, track, deplete and/or eliminate the tagged protein and/or cells expressing the tagged protein. Transduction markers can serve the same purposes but are derived from naturally occurring molecules and are often expressed using a skipping element that separates the transduction marker from the rest of the CD33-targeting agent.

[0423] Tag cassettes that bind cognate binding molecules include, for example, His tag (SEQ ID NO: 127), Flag tag (SEQ ID NO: 128), Xpress tag (SEQ ID NO: 129), Avi tag (SEQ ID NO: 130), Calmodulin tag (SEQ ID NO: 131), Polyglutamate tag, HA tag (SEQ ID NO: 132), Myc tag (SEQ ID NO: 133), Softag 1 (SEQ ID NO: 134), Softag 3 (SEQ ID NO: 135), and V5 tag (SEQ ID NO: 136).

[0424] Conjugate binding molecules that specifically bind tag cassette sequences disclosed herein are commercially available. For example, His tag antibodies are commercially available from suppliers including Life Technologies, Pierce Antibodies, and GenScript. Flag tag antibodies are commercially available from suppliers including Pierce Antibodies, GenScript, and Sigma-Aldrich. Xpress tag antibodies are commercially available from suppliers including Pierce Antibodies, Life Technologies and GenScript. Avi tag antibodies are commercially available from suppliers including Pierce Antibodies, IsBio, and Genecopoeia. Calmodulin tag antibodies are commercially available from suppliers including Santa Cruz Biotechnology, Abcam, and Pierce Antibodies. HA tag antibodies are commercially available from suppliers including Pierce Antibodies, Cell Signaling Technology and Abcam. Myc tag antibodies are commercially available from suppliers including Santa Cruz Biotechnology, Abcam, and Cell Signaling Technology.

[0425] Transduction markers may be selected from at least one of a truncated CD19 (tCD19; see Budde et al., Blood 122: 1660, 2013); a truncated human epidermal growth factor (tEGFR; see Wang et al., Blood 118: 1255, 2011); an extracellular domain of human CD34; and/or RQR8 which combines target epitopes from CD34 (see Fehse et al., Mol. Therapy 1(5 Pt 1); 448-456, 2000) and CD20 antigens (see Philip et al, Blood 124: 1277-1278).

[0426] In particular embodiments, a polynucleotide encoding an iCaspase9 construct (iCasp9) may be inserted into a CD33-targeting agent nucleotide construct as a suicide switch.

[0427] Control features may be present in multiple copies or can be expressed as distinct molecules with the use of a skipping element. For example, a CAR can have one, two, three, four or five tag cassettes and/or one, two, three, four, or five transduction markers could also be expressed. For example, embodiments can include a CD33-targeting agent having two Myc tag cassettes, or a His tag and an HA tag cassette, or a HA tag and a Softag 1 tag cassette, or a Myc tag and a SBP tag cassette. In particular embodiments, a transduction marker includes tEFGR. Exemplary transduction markers and cognate pairs are described in U.S. patent Ser. No. 13/463,247.

[0428] One advantage of including at least one control feature in cells genetically modified to express a CAR or TCR is that, if necessary or beneficial, the cells can be depleted following administration to a subject using the cognate binding molecule to a tag cassette.

[0429] In certain embodiments, CD33-targeting agents may be detected or tracked in vivo by using antibodies that bind with specificity to a control feature (e.g., anti-Tag antibodies), or by other cognate binding molecules that specifically bind the control feature, which binding partners for the control feature are conjugated to a fluorescent dye, radio-tracer, iron-oxide nanoparticle or other imaging agent known in the art for detection by X-ray, CT-scan, MRI-scan, PET-scan, ultrasound, flow-cytometry, near infrared imaging systems, or other imaging modalities (see, e.g., Yu et al., Theranostics 2:3, 2012).

[0430] Thus, CD33-targeting agents expressing at least one control feature can be more readily identified, isolated, sorted, tracked, and/or eliminated as compared to a CD33-targeting agent without a tag cassette.

[0431] In particular embodiments, the genetically-modified cells described herein are administered in combination with a treatment to target CD33-expressing cells using a CD33-targeting agent, such as an anti-CD33 antibody, an anti-CD33 immunotoxin (e.g., an antibody linked to a plant and/or bacterial toxin), an anti-CD33 antibody-drug conjugate (e.g., an antibody bound to a small molecule toxin), an anti-CD33 antibody-radioimmunoconjugate, an anti-CD33 bispecific antibody, an anti-CD33 bispecific antibody that binds CD33 and an immune activating epitope on an immune cell (e.g., a BiTE® (Amgen, Munich, Germany)), an anti-CD33 trispecific antibody, and/or an anti-CD33 CAR or TCR-modified T-cell.

### Applications

[0432] In various embodiments, a cell of a subject or system of the present disclosure is engineered to inactivate CD33. In various embodiments, CD33 is inactivated in one or more cells of a subject or system that has been contacted with, can be contacted with, or will be contacted with an anti-CD33 agent.

[0433] In various embodiments, CD33 is inactivated in one or more cells of a subject or system that has been identified as including cells of a CD33-expressing cancer where the subject has been contacted with, can be contacted with, or will be contacted with an anti-CD33 agent. In various embodiments, the cancer is a myeloid neoplasm. In various embodiments, the cancer is acute myeloid leukemia (AML), In various embodiments, the cancer is a myelodysplastic syndrome, acute biphenotypic leukemia, acute lymphocytic leukemia, chronic myelogenous leukemia, acute myeloid leukemia arising from previous myelodysplastic syndrome, acute promyelocytic leukemia, multiple myeloma, refractory anemia with excess blasts, secondary acute myeloid leukemia, system mastocytosis, skin cancer, therapy-related acute myeloid leukemia, or therapy-related myelodysplastic syndrome. In various embodiments, the cancer is lung cancer, colorectal cancer, head and neck cancer, stomach cancer, liver cancer, pancreatic cancer, urothelial cancer, prostate cancer, testis cancer, breast cancer, cervical cancer, endometrial cancer, ovarian cancer, melanoma, skin cancer, or lymphoma.

[0434] Particular embodiments include targeting any residual and/or non-therapeutic cells that express CD33 with the use of a CD33-targeting agent. In particular embodiments, genetically-modified therapeutic cells described herein can be administered alone or in combination with a CD33-targeting treatment, such as an anti-CD33 antibody, an anti-CD33 immunotoxin, an anti-CD33 antibody-drug conjugate, an anti-CD33 antibody-radioisotope conjugate, an anti-CD33 bispecific antibody, an anti-CD33 bispecific immune cell activating antibody, an anti-CD33 trispecific antibody, and/or an anti-CD33 chimeric antigen receptor (CAR) or T cell receptor (TCR) modified immune cell.

[0435] In various embodiments, agents for CD33 inactivation are administered together with (e.g., encoded by the same vector as) a therapeutic agent for treatment of a condition of CD33-expressing cells, such as HSCs. Accordingly, in various embodiments, agents for CD33 inactivation are administered to a subject having a condition that can be treated by engineering of HSCs. The present disclosure therefore further includes gene therapy reagents such as viral vectors that include nucleic acid sequences that encode a base editing system for CD33 inactivation together with a transgene encoding a further therapeutic payload expression product, e.g., for treatment of a condition that can be treated by HSC engineering.

[0436] Particular examples of therapeutic genes and/or gene products include γ-globin, Factor VIII, γC, JAK3, IL7RA, RAG1, RAG2, DCLRE1C, PRKDC, LIG4, NHEJ1, CD3D, CD3E, CD3Z, CD3G, PTPRC, ZAP70, LCK, AK2, ADA, PNP, WHN, CHD7, ORAI1, STIM1, CORO1A, CIITA, RFXANK, RFX5, RFXAP, RMRP, DKC1, TERT, TINF2, DCLRE1B, and SLC46A1; FANC family genes including FancA, FancB, FancC, FancD1 (BRCA2), FancD2, FancE, FancF, FancG, Fancl, FancJ (BRIP1), FancL, FancM, FancN (PALB2), FancO (RAD51C), FancP (SLX4), FancQ (ERCC4), FancR (RAD51), FancS (BRCA1), FancT (UBE2T), FancU (XRCC2), FancV (MAD2L2), and FancW (RFWD3); soluble CD40; CTLA; Fas L; antibodies to CD4, CD5, CD7, CD52, etc.; antibodies to IL1, IL2, IL6; an antibody to TCR specifically present on autoreactive T cells; IL4; IL10; IL12; IL13; ID Ra, sIL1RI, sIL1RII; sTNFRI; sTNFRII; antibodies to TNF; P53, PTPN22, and DRB1*1501/DQB1*0602; globin family genes; WAS; phox; dystrophin; pyruvate kinase; CLN3; ABCD1; arylsulfatase A; SFTPB; SFTPC; NLX2.1; ABCA3; GATA1; ribosomal protein genes; TERT; TERC; DKC1; TINF2; CFTR; LRRK2; PARK2; PARK7; PINK1; SNCA; PSEN1; PSEN2; APP; SOD1; TDP43; FUS; ubiquilin 2; C9ORF72 and other therapeutic genes described herein. In various embodiments of the present disclosure, a vector encodes a globin gene, wherein the globin protein encoded by the globin gene is selected from a γ-globin, a β-globin, and/or an α-globin. Globin genes of the present disclosure can include, e.g., one or more regulatory sequences such as a promoter operably linked to a nucleic acid sequence encoding a globin protein. As those of skill in the art will appreciate, each of γ-globin, β-globin, and/or α-globin is a component of fetal and/or adult hemoglobin and is therefore useful in various vectors disclosed herein. Various therapeutic genes and vector payloads are disclosed in related application No. PCT/US2020/040756, which is incorporated herein by reference in its entirety and with respect to therapeutic genes and payloads, e.g., for use in viral vectors.

[0437] As another example, a therapeutic gene can be selected to provide a therapeutically effective response against a lysosomal storage disorder. In particular embodiments, the lysosomal storage disorder is mucopolysaccharidosis (MPS), type I; MPS II or Hunter Syndrome; MPS III or Sanfilippo syndrome; MPS IV or Morquio syndrome; MPS V; MPS VI or Maroteaux-Lamy syndrome; MPS VII or sly syndrome; α-mannosidosis; β-mannosidosis; glycogen storage disease type I, also known as GSDI, von Gierke disease, or Tay Sachs; Pompe disease; Gaucher disease; Fabry disease. The therapeutic gene may be, for example a gene encoding or inducing production of an enzyme, or that otherwise causes the degradation of mucopolysaccharides in lysosomes. Exemplary therapeutic genes include IDUA or iduronidase, IDS, GNS, HGSNAT, SGSH, NAGLU, GUSB, GALNS, GLB1, ARSB, and HYAL1. Exemplary effective genetic therapies for lysosomal storage disorders may, for example, encode or induce the production of enzymes responsible for the degradation of various substances in lysosomes; reduce, eliminate, prevent, or delay the swelling in various organs, including the head (exp. macrocephaly), the liver, spleen, tongue, or vocal cords; reduce fluid in the brain; reduce heart valve abnormalities; prevent or dilate narrowing airways and prevent related upper respiratory conditions like infections and sleep apnea; reduce, eliminate, prevent, or delay the destruction of neurons, and/or the associated symptoms.

[0438] As another example, a therapeutic gene can be selected to provide a therapeutically effective response against a hyperproliferative disease. In particular embodiments, the hyperproliferative disease is cancer. The therapeutic gene may be, for example, a tumor suppressor gene, a gene that induces apoptosis, a gene encoding an enzyme, a gene encoding an antibody, or a gene encoding a hormone. Exemplary therapeutic genes and gene products include (in addition to those listed elsewhere herein) 101F6, 123F2 (RASSF1), 53BP2, abl, ABLI, ADP, aFGF, APC, ApoAI, ApoAIV, ApoE, ATM, BAI-1, BDNF, Beta*(BLU), bFGF, BLC1, BLC6, BRCA1, BRCA2, CBFA1, CBL, C-CAM, CNTF, COX-1, CSFIR, CTS-1, cytosine deaminase, DBCCR-1, DCC, Dp, DPC-4, E1A, E2F, EBRB2, erb, ERBA, ERBB, ETS1, ETS2, ETV6, Fab, FCC, FGF, FGR, FHIT, fms, FOX, FUS1, FYN, G-CSF, GDAIF, Gene 21 (NPRL2), Gene 26 (CACNA2D2), GM-CSF, GMF, gsp, HCR, HIC-1, HRAS, hst, IGF, IL-1, IL-2, IL-3, IL-5, IL-6, IL-7, IL-8, IL-9, IL-11, ING1, interferon α, interferon β, interferon γ, IRF-1, JUN, KRAS, LUCA-1 (HYAL1), LUCA-2 (HYAL2), LYN, MADH4, MADR2, MCC, mda7, MDM2, MEN-I, MEN-II, MLL, MMAC1, MYB, MYC, MYCL1, MYCN, neu, NF-1, NF-2, NGF, NOEY1, NOEY2, NRAS, NT3, NTS, OVCA1, p16, p21, p27, p57, p73, p300, PGS, PIM1, PL6, PML, PTEN, raf, Rap1A, ras, Rb, RB1, RET, rks-3, ScFv, scFV ras, SEM A3, SRC, TALI, TCL3, TFPI, thrombospondin, thymidine kinase, TNF, TP53, trk, T-VEC, VEGF, VHL, WT1, WT-1, YES, and zac1. Exemplary effective genetic therapies may suppress or eliminate tumors, result in a decreased number of cancer cells, reduced tumor size, slow or eliminate tumor growth, or alleviate symptoms caused by tumors.

[0439] As another example, a therapeutic gene can be selected to provide a therapeutically effective response against an infectious disease. In particular embodiments, the infectious disease is human immunodeficiency virus (HIV). The therapeutic gene may be, for example, a gene rendering immune cells resistant to HIV infection, or which enables immune cells to effectively neutralize the virus via immune reconstruction, polymorphisms of genes encoding proteins expressed by immune cells, genes advantageous for fighting infection that are not expressed in the patient, genes encoding an infectious agent, receptor or coreceptor; a gene encoding ligands for receptors or coreceptors; viral and cellular genes essential for viral replication including; a gene encoding ribozymes, antisense RNA, small interfering RNA (siRNA) or decoy RNA to block the actions of certain transcription factors; a gene encoding dominant negative viral proteins, intracellular antibodies, intrakines and suicide genes. Exemplary therapeutic genes and gene products include α2β1; αvβ3; αvβ5; αvβ63; BOB/GPR15; Bonzo/STRL-33/TYMSTR; CCR2; CCR3; CCRS; CCR8; CD4; CD46; CD55; CXCR4; aminopeptidase-N; HHV-7; ICAM; ICAM-1; PRR2/HveB; HveA; α-dystroglycan; LDLR/α2MR/LRP; PVR; PRR1/HveC; and laminin receptor. A therapeutically effective amount for the treatment of HIV, for example, may increase the immunity of a subject against HIV, ameliorate a symptom associated with AIDS or HIV, or induce an innate or adaptive immune response in a subject against HIV. An immune response against HIV may include antibody production and result in the prevention of AIDS and/or ameliorate a symptom of AIDS or HIV infection of the subject, or decrease or eliminate HIV infectivity and/or virulence.

[0440] The therapeutic administration of HSC can be used to treat a variety of adverse conditions including immune deficiency diseases, blood disorders, malignant cancers, infections, and radiation exposure (e.g., cancer treatment, accidental, or attack-based).

[0441] In various embodiments, methods and compositions of the present disclosure are used to treat, as a component of a therapy for, and/or in conjunction with a therapy for a rare hematology indication. Examples of rare hematology indications include, without limitation rare platelet disorders (e.g. Bernard-Soulier syndrome and Glanzmann thrombasthenia), Bone marrow failure conditions (e.g., Diamond-Blackfan anemia), other red cell disorders (e.g., pyruvate kinase deficiency), autoimmune rare hematologies (e.g., acquired thrombotic thrombocytopenic purpura (aTTP) and congenital thrombotic thrombocytopenic purpura (cTTP)), Primary Immunodeficiencies (PIDs) (e.g., Wiskott-Aldrich syndrome (WAS), Severe combined immunodeficiency due to adenosine deaminase deficiency (ADA-SCID), X-linked severe combined immunodeficiency (SCID-X1), DOCK 8 deficiency, major histocompatibility complex class II deficiency (MHC-II), and CD40/CD40L deficiencies), and other indications that include inborn errors of metabolism (IEMs) (e.g., hereditary hemochromatosis and phenylketonuria (PKU)).

[0442] As further particular examples of conditions that can be treated with HSC, more than 80 primary immune deficiency diseases are recognized by the World Health Organization. These diseases are characterized by an intrinsic defect in the immune system in which, in some cases, the body is unable to produce any or enough antibodies against infection. In other cases, cellular defenses to fight infection fail to work properly. Typically, primary immune deficiencies are inherited disorders.

[0443] One example of a primary immune deficiency is Fanconi anemia (FA). FA is an inherited blood disorder that leads to bone marrow (BM) failure. It is characterized, in part, by a deficient DNA-repair mechanism. At least 20% of patients with FA develop cancers such as acute myeloid leukemias and cancers of the skin, liver, gastrointestinal tract, and gynecological system. The skin and gastrointestinal tumors are usually squamous cell carcinomas. The average age of FA patients who develop cancer is 15 years for leukemia, 16 years for liver tumors, and 23 years for other tumors. The present disclosure includes the recognition that use of CD33 as a selection agent is particularly useful in the context of treatment of FA using a therapy that includes therapeutic HSCs at least in that various other means of therapeutic cell selection are not compatible with the biology of FA. The Fanconi anemia/BRCA (FA/BRCA) DNA damage repair pathway plays a pivotal role in the cellular response to DNA alkylating agents and greatly influences drug response in cancer treatment. Accordingly, FA patients are susceptible to adverse reaction to administration of alkylating agents such as BCNU, which is used as a selection agent for cells bearing the selectable marker MGMT^{P140K}. Accordingly, the present disclosure includes the recognition that use of CD33 inactivation as a selection agent in combination with an anti-CD33 agent has particular utility in HSC therapy for the treatment of FA.

[0444] X-linked severe combined immunodeficiency (SCID-X1) is both a cellular and humoral immune depletion caused by mutations in the common gamma chain gene (γC), which result in the absence of T and natural killer (NK) lymphocytes and the presence of nonfunctional B lymphocytes. SCID-X1 is fatal in the first two years of life unless the immune system is reconstituted, for example, through bone marrow transplant (BMT) or cell and gene therapy.

[0445] Secondary, or acquired, immune deficiencies are not the result of inherited genetic abnormalities, but rather occur in individuals in which the immune system is compromised by factors outside the immune system. Examples include trauma, viruses, chemotherapy, toxins, and pollution. Acquired immunodeficiency syndrome (AIDS) is an example of a secondary immune deficiency disorder caused by a virus, the human immunodeficiency virus (HIV), in which a depletion of T lymphocytes renders the body unable to fight infection.

[0446] FA, SCID, and other immune deficiencies or blood disorders as well as viral infections and cancer can be treated by a bone marrow transplant (BMT) or by administering hematopoietic cells that have been genetically modified to provide a functioning gene that the patient lacks. Therapeutic genes that can treat FA and SCID are described below. Therapeutic genes can also provide enzymes that are currently used for Enzyme replacement therapies (ERT) for lysosomal storage diseases such as Pompe disease (acid alpha-glucosidase), Gaucher disease (glucocerebrosidase), Fabry disease (alpha-galactosidase A), and Mucopolysaccharidosis type I (alpha-L-Iduronidase); blood-related cardiovascular diseases (e.g. familial apolipoprotein E deficiency and atherosclerosis (ApoE)); viral infections by expression of viral decoy receptors (e.g. for HIV-soluble CD4, or broadly neutralizing antibodies (bNAbs)) for HIV, chronic HCV, or HBV infections; and cancer (e.g. controlled expression of monoclonal antibodies (e.g. trastuzumab) or checkpoint inhibitors (e.g. aPDL1). Other additional uses are described in more detail elsewhere herein.

[0447] Immune deficiencies, blood cancers, and other blood-related disorders can be treated by a BMT or by administering hematopoietic cells. In some instances, the hematopoietic cells can be genetically modified to provide a functioning gene that the patient lacks.

[0448] In particular embodiments, methods of the present disclosure can be used to treat acquired thrombocytopenia, acute lymphoblastic leukemia (ALL), acute myelogenous leukemia (AML), adrenoleukodystrophy, agnogenic myeloid metaplasia, AIDS, amegakaryocytosic/congenital thrombocytopenia, aplastic anemia, ataxia telangiectasia, β-thalassemia major, Chediak-Higashi syndrome, chronic granulomatous disease, chronic lymphocytic leukemia (CLL), chronic myelogenous leukemia (CML), chronic myelomonocytic leukemia, common variable immune deficiency (CVID), complement disorders, congenital agammaglobulinemia, Diamond Blackfan syndrome, diffuse large B-cell lymphoma, Fabry disease (alpha-galactosidase A), familial erythrophagocytic lymphohistiocytosis, Fanconi's anemia, fetal maternal incompatibility, follicular lymphoma, Gaucher disease (glucocerebrosidase), hemolytic anemia, Hodgkin's lymphoma, Hurler's syndrome, hyper IgM, IgG subclass deficiency, hypogammaglobulinemia, immune thrombocytopenia purpura, juvenile myelomonocytic leukemia, leukemia, lymphoma, May-Hegglin syndrome, metachromatic leukodystrophy, mucopolysaccharidoses, mucopolysaccharidosis type I (alpha-L-Iduronidase), multiple myeloma (MM), myelodysplastic syndrome (MDS or myelodysplasia), myelofibrosis, non-Hodgkin's lymphoma (NHL), paroxysmal nocturnal hemoglobinuria (PNH), Pompe disease, primary immunodeficiency diseases with antibody deficiency, pure red cell aplasia, refractory anemia, SCID, selective IgA deficiency, severe aplastic anemia, Shwachman-Diamond-Blackfan anemia, sickle cell disease, specific antibody deficiency, systemic lupus erythematosus (SLE), thrombocytopenia, Wiskott-Aldridge syndrome, and X-linked agammaglobulinemia (XLA).

[0449] Additional exemplary cancers that may be treated include solid tumors, astrocytoma, atypical teratoid rhabdoid tumor, brain and central nervous system (CNS) cancer, breast cancer, carcinosarcoma, chondrosarcoma, chordoma, choroid plexus carcinoma, choroid plexus papilloma, clear cell sarcoma of soft tissue, gastrointestinal stromal tumor, glioblastoma, HBV-induced hepatocellular carcinoma, head and neck cancer, kidney cancer, lung cancer, malignant rhabdoid tumor, medulloblastoma, melanoma, meningioma, mesothelioma, neuroglial tumor, not otherwise specified (NOS) sarcoma, oligoastrocytoma, oligodendroglioma, osteosarcoma, ovarian cancer, ovarian clear cell adenocarcinoma, ovarian endometrioid adenocarcinoma, ovarian serous adenocarcinoma, pancreatic cancer, pancreatic ductal adenocarcinoma, pancreatic endocrine tumor, pineoblastoma, prostate cancer, renal cell carcinoma, renal medullo-carcinoma, rhabdomyosarcoma, sarcoma, schwannoma, skin squamous cell carcinoma, and stem cell cancer.

[0450] Particular examples of therapeutic genes and/or gene products to treat immune deficiencies can include genes associated with FA including: FancA, FancB, FancC, FancD1 (BRCA2), FancD2, FancE, FancF, FancG, Fancl, FancJ (BRIP1), FancL, FancM, FancN (PALB2), FancO (RAD51C), FancP (SLX4), FancQ (ERCC4), FancR (RAD51), FancS (BRCA1), FancT (UBE2T), FancU (XRCC2), FancV (MAD2L2), and FancW (RFWD3). Exemplary genes and proteins associated with FA include: Homo sapiens FANCA coding sequence; Homo sapiens FANCC coding sequence; Homo sapiens FANCE coding sequence; Homo sapiens FANCF coding sequence; Homo sapiens FANCG coding sequence; Homo sapiens FANCA AA; Homo sapiens FANCC AA; Homo sapiens FANCE AA; Homo sapiens FANCF AA; and Homo sapiens FANCG AA.

[0451] Particular examples of therapeutic genes and/or gene products to treat immune deficiencies can include genes associated with SCID including: γC, JAK3, IL7RA, RAG1, RAG2, DCLRE1C, PRKDC, LIG4, NHEJ1, CD3D, CD3E, CD3Z, CD3G, PTPRC, ZAP70, LCK, AK2, ADA, PNP, WHN, CHD7, ORAI1, STIM1, CORO1A, CIITA, RFXANK, RFX5, RFXAP, RMRP, DKC1, TERT, TINF2, DCLRE1 B, and SLC46A1. Exemplary genes and proteins associated with SCID include: exemplary codon optimized Human γC DNA; exemplary native Human γC DNA; exemplary native canine γC DNA; exemplary human γC AA; and exemplary native canine γC AA (91% conserved with human). Exemplary genes and proteins associated with SCID include: Homo sapiens JAK3 coding sequence; Homo sapiens PNP coding sequence; Homo sapiens ADA coding sequence; Homo sapiens RAG1 coding sequence; Homo sapiens RAG2 coding sequence; Homo sapiens JAK3 AA; Homo sapiens PNP AA; Homo sapiens ADA AA; Homo sapiens RAG1 AA; and Homo sapiens RAG2 AA.

[0452] Additional exemplary therapeutic genes can include or encode for clotting and/or coagulation factors such as factor VIII (FVIII), FVII, von Willebrand factor (VWF), FI, FII, FV, FX, FXI, and FXIII).

[0453] Additional examples of therapeutic genes and/or gene products include those that can provide a therapeutically effective response against diseases related to red blood cells and clotting. In particular embodiments, the disease is a hemoglobinopathy like thalassemia, or a SCD/trait. Exemplary therapeutic genes include F8 and F9.

[0454] Particular examples of therapeutic genes and/or gene products include γ-globin; soluble CD40; CTLA; Fas L; antibodies to CD4, CD5, CD7, CD52, etc.; antibodies to IL1, IL2, IL6; an antibody to TCR specifically present on autoreactive T cells; IL4; ID 0; ID 2; ID 3; ID Ra, sIL1RI, sIL1R11; sTNFRI; sTNFRII; antibodies to TNF; P53, PTPN22, and DRB1*1501/DQB1*0602; globin family genes; WAS; phox; dystrophin; pyruvate kinase (PK); CLN3; ABCD1; arylsulfatase A (ARSA); SFTPB; SFTPC; NLX2.1; ABCA3; GATA1; ribosomal protein genes; TERC; CFTR; LRRK2; PARK2; PARK7; PINK1; SNCA; PSEN1; PSEN2; APP; SOD1; TDP43; FUS; ubiquilin 2; C9ORF72 and other therapeutic genes described herein.

[0455] Particular embodiments include inserting or altering a gene selected from ABLI, AKT1, APC, ARSB, BCL11A, BLC1, BLC6, BRCA1, BRIP1, C46, CAS9, C-CAM, CBFAI, CBL, CCR5, CD19, CDA, C-MYC, CRE, CSCR4, CSFIR, CTS-I, CYB5R3, DCC, DHFR, DLL1, DMD, EGFR, ERBA, ERBB, EBRB2, ETSI, ETS2, ETV6, FCC, FGR, FOX, FUSI, FYN, GALNS, GLB1, GNS, GUSB, HBB, HBD, HBE1, HBG1, HBG2, HCR, HGSNAT, HOXB4, HRAS, HYAL1, ICAM-1, iCaspase, IDUA, IDS, JUN, KLF4, KRAS, LYN, MCC, MDM2, MGMT, MLL, MMACI, MYB, MEN-I, MEN-II, MYC, NAGLU, NANOG, NF-1, NF-2, NKX2.1, NOTCH, OCT4, p16, p2I, p27, p57, p73, PALB2, RAD51C, ras, at least one of RPL3 through RPL40, RPLPO, RPLP1, RPLP2, at least one of RPS2 through RPS30, RPSA, SGSH, SLX4, SOX2, VHL, and WT-I.

[0456] In addition to therapeutic genes and/or gene products, the transgene can also encode for therapeutic molecules, such as checkpoint inhibitor reagents, chimeric antigen receptor molecules specific to one or more cellular antigen (e.g. cancer antigen), and/or T-cell receptor specific to one or more cellular antigen (e.g. cancer antigen).

[0457] As indicated previously, FA is an inherited genetic disease characterized by fragile bone marrow cells and the inability to repair DNA damage, which accumulates in repopulating stem cells, resulting in eventual bone marrow failure. This disease can arise through mutations in any of a family of Fanconi-associated genes, with the most common of these mutations occurring in either the FANCA, FANCC, or FANCG genes. The current treatment protocol for patients is a bone marrow transplant from a matched donor, ideally from a sibling. However, the majority of patients will not have an appropriately matched sibling donor, and transplants from alternative donors are still associated with substantial toxicity and morbidity. For these patients, ongoing trials use an autologous transplant combined with new gene therapy approaches to introduce a corrected form of the mutated gene through collection and modification of the patient's own hematopoietic stem cells (e.g., Clinical Trial No. NCT01331018, accessible online at clinicaltrials.gov/ct2/show/NCT01331018).

[0458] In various embodiments, another problem for transplant recipients and recipients of other therapies disclosed herein is the conditioning regimens used in some embodiments to prepare the marrow compartment for infused cells to engraft. In various treatment scenarios, it is important to remove or eliminate cells of a patient's existing hematopoietic system or to reduce the number and/or concentration of one or more cells thereof (e.g., HSCs and/or HSPCs) to avoid leaving, and/or reduce the number or concentration of remaining, diseased cells following the treatment. This is in part because, if left, diseased residual cells can lead to malignancies later in life. Removing a patient's existing hematopoietic system is most often accomplished utilizing a process referred to as conditioning. In various embodiments, this type of conditioning precedes administration of therapeutic HSCs (e.g., engineered HSCs). Traditionally, conditioning has involved the delivery of maximally tolerated doses of chemotherapeutic agents with nonoverlapping toxicities, with or without radiation. Current conditioning regimens involve total body irradiation (TBI) and/or cytotoxic drugs. These regimens are non-targeted, genotoxic, and have multiple short- and long-term adverse effects such as an increased risk of developing DNA repair disorders, interstitial pneumonitis, idiopathic pulmonary fibrosis, reduced lung pulmonary function, renal damage, sinusoidal obstruction syndrome (SOS), infertility, cataract formation, hyperthyroidism, thyroiditis, and secondary cancers. Besides morbidity, these regimens are also associated with significant mortality. Therefore, methods to reduce or eliminate the need for conditioning in these patients is desperately needed.

[0459] In view of various challenges associated with conditioning, regimens that minimize and/or reduce the intensity of conditioning have been developed but in various embodiments remain problematic. Since chemotherapy or other DNA damaging agents are not well tolerated in these patients due to their underlying disease condition, in autologous transplants, gene modified cells are re-administered without prior conditioning. While safer, avoidance of conditioning potentially prevents efficient engraftment of corrected cells into the marrow niche where they can begin contributing to hematopoietic development. In the allogeneic transplant setting initial conditioning regimens included TBI and cyclophosphamide (Cy), however, significant mortality was observed secondary to graft-versus-host disease (GVHD) and Cy toxicity including hemorrhagic cystitis, mucositis, and cardiac failure. For this reason, reduced-intensity conditioning (RIC) is now used for FA patients which includes low-dose Cy, fludarabine, and anti-thymocyte globulin. Although overall survival has improved using RIC, late complications continue to be an issue whether associated with conditioning, GVHD, or from disease-related complications.

[0460] For the reasons noted above, FA is an ideal candidate for autologous gene therapy, wherein the patient's own HSC can supply a functional FA gene, thereby diminishing GVHD risk. Importantly, the rationale for autologous genetic correction, even in a small number of cells, is supported by the spontaneous correction of the mutated FA gene documented in a few FA patients and resulting improvement in hematologic parameters. This “somatic mosaicism” occurs in single cell clones that can then sustain hematopoiesis over years without the requirement for marrow conditioning. A number of preclinical studies have demonstrated in vitro gene delivery by viral vectors, resulting in FA phenotype correction as demonstrated by protection from DNA crosslinking agents, such as mitomycin C (MMC). Integrating retroviral vectors encoding FANCA or FANCC cDNA were used to transduce FA murine hematopoietic progenitor cells, restore resistance of colony forming cells to MMC, and repopulate murine homozygous deficient models. As a result, several clinical trials have been conducted. All of these trials have attempted collection of FA patient HSPC by selecting CD34⁺ cells for ex vivo gene transfer and subsequent reinfusion to limit off-target transduction for reasons of both safety and efficacy. One important remaining obstacle with autologous gene therapy is the presence of residual FA hematopoiesis that can result in myeloid malignancy, a scenario that could be minimized with the inclusion of the disclosed strategy to eliminate non-corrected or host FA cells. The current disclosure and treatment methods address this concern.

[0461] In particular embodiments, therapeutic efficacy can be observed through mouse models of FA transplantation that have been used to study ex vivo gene therapy of HSPCs. One such model includes a functional knockout of the FANCA gene, resulting in fragile marrow of these mice that are thus unable to form healthy colonies when bone marrow is plated in outgrowth assays in the presence of even low levels of MMC, a DNA damaging agent. Healthy heterozygote littermates exhibit bone marrow colony forming potential regardless of MMC presence, whereas FANCA mice are demonstrated to have a significant decrease in colony forming potential with increasing MMC concentration. This mimics the clinical setting where patient stem cells exhibit a similar phenotype when exposed to DNA damaging agents. The use of low-dose Cy for bone marrow transplant in this mouse model has been demonstrated. Without some form of pre-conditioning prior to transplant, donor cells can home to the bone marrow; however, they do not contribute to peripheral hematopoiesis. This underscores the need to both clear FANCA-deficient stem cell populations and promote engraftment and hematopoietic development of transplanted donor or gene-corrected autologous cell populations.

[0462] In particular embodiments, therapeutic efficacy for FA (and other immune deficiency disorders) can be observed through lymphocyte reconstitution, improved clonal diversity and thymopoiesis, reduced infections, and/or improved patient outcome. Therapeutic efficacy can also be observed through one or more of weight gain and growth, improved gastrointestinal function (e.g., reduced diarrhea), reduced upper respiratory symptoms, reduced fungal infections of the mouth (thrush), reduced incidences and severity of pneumonia, reduced meningitis and blood stream infections, and reduced ear infections. In particular embodiments, treating FA with methods of the present disclosure include increasing resistance of BM derived cells to mitomycin C (MMC). In particular embodiments, the resistance of BM derived cells to MMC can be measured by a cell survival assay in methylcellulose and MMC.

[0463] In particular embodiments, methods of the present disclosure can be used to treat SCID-X1. In particular embodiments, methods of the present disclosure can be used to treat SCID (e.g., JAK 3 kinase deficiency SCID, purine nucleoside phosphorylase (PNP) deficiency SCID, adenosine deaminase (ADA) deficiency SCID, MHC class II deficiency or recombinase activating gene (RAG) deficiency SCID). In particular embodiments, therapeutic efficacy can be observed through lymphocyte reconstitution, improved clonal diversity and thymopoiesis, reduced infections, and/or improved patient outcome. Therapeutic efficacy can also be observed through one or more of weight gain and growth, improved gastrointestinal function (e.g., reduced diarrhea), reduced upper respiratory symptoms, reduced fungal infections of the mouth (thrush), reduced incidences and severity of pneumonia, reduced meningitis and blood stream infections, and reduced ear infections. In particular embodiments, treating SCID-X1 with methods of the present disclosure include restoring functionality to the γC-dependent signaling pathway. The functionality of the γC-dependent signaling pathway can be assayed by measuring tyrosine phosphorylation of effector molecules STAT3 and/or STAT5 following in vitro stimulation with IL-21 and/or IL-2, respectively. Tyrosine phosphorylation of STAT3 and/or STAT5 can be measured by intracellular antibody staining.

[0464] Particular embodiments include treatment of secondary, or acquired, immune deficiencies such as immune deficiencies caused by trauma, viruses, chemotherapy, toxins, and pollution. As previously indicated, acquired immunodeficiency syndrome (AIDS) is an example of a secondary immune deficiency disorder caused by a virus, the human immunodeficiency virus (HIV), in which a depletion of T lymphocytes renders the body unable to fight infection. Thus, as another example, a gene can be selected to provide a therapeutically effective response against an infectious disease. In particular embodiments, the infectious disease is human immunodeficiency virus (HIV). The therapeutic gene may be, for example, a gene rendering immune cells resistant to HIV infection, or which enables immune cells to effectively neutralize the virus via immune reconstruction, polymorphisms of genes encoding proteins expressed by immune cells, genes advantageous for fighting infection that are not expressed in the patient, genes encoding an infectious agent, receptor or coreceptor; a gene encoding ligands for receptors or coreceptors; viral and cellular genes essential for viral replication including; a gene encoding ribozymes, antisense RNA, small interfering RNA (siRNA) or decoy RNA to block the actions of certain transcription factors; a gene encoding dominant negative viral proteins, intracellular antibodies, intrakines and suicide genes. Exemplary therapeutic genes and gene products include α2β1; αvβ3; αvβ5; αvβ63; BOB/GPR15; Bonzo/STRL-33/TYMSTR; CCR2; CCR3; CCR5; CCR8; CD4; CD46; CD55; CXCR4; aminopeptidase-N; HHV-7; ICAM; ICAM-1; PRR2/HveB; HveA; α-dystroglycan; LDLR/α2MR/LRP; PVR; PRR1/HveC; and laminin receptor. A therapeutically effective amount for the treatment of HIV, for example, may increase the immunity of a subject against HIV, ameliorate a symptom associated with AIDS or HIV, or induce an innate or adaptive immune response in a subject against HIV. An immune response against HIV may include antibody production and result in the prevention of AIDS and/or ameliorate a symptom of AIDS or HIV infection of the subject or decrease or eliminate HIV infectivity and/or virulence.

[0465] In particular embodiments, methods of the present disclosure can be used to treat hypogammaglobulinemia. Hypogammaglobulinemia is caused by a lack of B-lymphocytes and is characterized by low levels of antibodies in the blood. Hypogammaglobulinemia can occur in patients with chronic lymphocytic leukemia (CLL), multiple myeloma (MM), non-Hodgkin's lymphoma (NHL) and other relevant malignancies as a result of both leukemia-related immune dysfunction and therapy-related immunosuppression. Patients with acquired hypogammaglobulinemia secondary to such hematological malignancies, and those patients receiving post-HSPC transplantation are susceptible to bacterial infections. The deficiency in humoral immunity is largely responsible for the increased risk of infection-related morbidity and mortality in these patients, especially by encapsulated microorganisms. For example, Streptococcus pneumoniae, Hemophilus influenzae, and Staphylococcus aureus, as well as Legionella and Nocardia spp. are frequent bacterial pathogens that cause pneumonia in patients with CLL. Opportunistic infections such as Pneumocystis carinii, fungi, viruses, and mycobacteria also have been observed. The number and severity of infections in these patients can be significantly reduced by administration of immune globulin (Griffiths et al., Blood 73: 366-368, 1989; Chapel et al., Lancet 343: 1059-1063, 1994).

[0466] In particular embodiments, a therapeutically effective treatment induces or increases expression of fetal hemoglobin (HbF), induces or increases production of hemoglobin and/or induces or increases production of β-globin. In particular embodiments, a therapeutically effective treatment improves blood cell function, and/or increases oxygenation of cells. Treatments that induce and/or increase expression of HbF as disclosed herein can be useful in the treatment of various conditions disclosed herein, including without limitation thalassemia (e.g., β-thalassemia) and sickle cell disease.

[0467] In the context of cancers, therapeutically effective amounts have an anti-cancer effect. An anti-cancer effect can be quantified by observing a decrease in the number of cancer cells, a decrease in the number of metastases, a decrease in cancer volume, an increase in life expectancy, induction of apoptosis of cancer cells, induction of cancer cell death, inhibition of cancer cell proliferation, inhibition of tumor (e.g., solid tumor) growth, prevention of metastasis, prolongation of a subject's life, and/or reduction of relapse or re-occurrence of the cancer following treatment.

[0468] In particular embodiments, methods of the present disclosure can restore BM function in a subject in need thereof. In particular embodiments, restoring BM function can include improving BM repopulation with gene corrected cells as compared to a subject in need thereof that is not administered a therapy described herein. Improving BM repopulation with gene corrected cells can include increasing the percentage of cells that are gene corrected. In particular embodiments, the cells are selected from white blood cells and BM derived cells. In particular embodiments, the percentage of cells that are gene corrected can be measured using an assay selected from quantitative real time PCR and flow cytometry.

[0469] In particular embodiments, methods of the present disclosure can restore T-cell mediated immune responses in a subject in need thereof. Restoration of T-cell mediated immune responses can include restoring thymic output and/or restoring normal T lymphocyte development.

[0470] In particular embodiments, methods of the present disclosure can improve the kinetics and/or clonal diversity of lymphocyte reconstitution in a subject in need thereof. In particular embodiments, improving the kinetics of lymphocyte reconstitution can include increasing the number of circulating T lymphocytes to within a range of a reference level derived from a control population. In particular embodiments, improving the kinetics of lymphocyte reconstitution can include increasing the absolute CD3+ lymphocyte count to within a range of a reference level derived from a control population. A range can be a range of values observed in or exhibited by normal (i.e., non-immuno-compromised) subjects for a given parameter. In particular embodiments, improving the kinetics of lymphocyte reconstitution can include reducing the time required to reach normal lymphocyte counts as compared to a subject in need thereof not administered a therapy described herein. In particular embodiments, improving the kinetics of lymphocyte reconstitution can include increasing the frequency of gene corrected lymphocytes as compared to a subject in need thereof not administered a therapy described herein. In particular embodiments, improving the kinetics of lymphocyte reconstitution can include increasing diversity of clonal repertoire of gene corrected lymphocytes in the subject as compared to a subject in need thereof not administered a gene therapy described herein. Increasing diversity of clonal repertoire of gene corrected lymphocytes can include increasing the number of unique retroviral integration site (RIS) clones as measured by a RIS analysis.

[0471] In particular embodiments, restoring thymic output can include restoring the frequency of CD3+ T cells expressing CD45RA in peripheral blood to a level comparable to that of a reference level derived from a control population. In particular embodiments, restoring thymic output can include restoring the number of T cell receptor excision circles (TRECs) per 10⁶ maturing T cells to a level comparable to that of a reference level derived from a control population. The number of TRECs per 10⁶ maturing T cells can be determined as described in Kennedy et al., Vet Immunol Immunopathol 142: 36-48, 2011.

[0472] In particular embodiments, restoring normal T lymphocyte development includes restoring the ratio of CD4+ cells: CD8+ cells to 2. In particular embodiments, restoring normal T lymphocyte development includes detecting the presence of αβ TCR in circulating T-lymphocytes. The presence of αβ TCR in circulating T-lymphocytes can be detected, for example, by flow cytometry using antibodies that bind an α and/or β chain of a TCR. In particular embodiments, restoring normal T lymphocyte development includes detecting the presence of a diverse TCR repertoire comparable to that of a reference level derived from a control population. TCR diversity can be assessed by TCRVβ spectratyping, which analyzes genetic rearrangement of the variable region of the TCRβ gene. Robust, normal spectratype profiles can be characterized by a Gaussian distribution of fragments sized across 17 families of TCRVβ segments. In particular embodiments, restoring normal T lymphocyte development includes restoring T-cell specific signaling pathways. Restoration of T-cell specific signaling pathways can be assessed by lymphocyte proliferation following exposure to the T cell mitogen phytohemagglutinin (PHA). In particular embodiments, restoring normal T lymphocyte development includes restoring white blood cell count, neutrophil cell count, monocyte cell count, lymphocyte cell count, and/or platelet cell count to a level comparable to a reference level derived from a control population.

[0473] In particular embodiments, methods of the present disclosure can normalize primary and secondary antibody responses to immunization in a subject in need thereof. Normalizing primary and secondary antibody responses to immunization can include restoring B-cell and/or T-cell cytokine signaling programs functioning in class switching and memory response to an antigen. Normalizing primary and secondary antibody responses to immunization can be measured by a bacteriophage immunization assay. In particular embodiments, restoration of B-cell and/or T-cell cytokine signaling programs can be assayed after immunization with the T-cell dependent neoantigen bacteriophage ΨX174. In particular embodiments, normalizing primary and secondary antibody responses to immunization can include increasing the level of IgA, IgM, and/or IgG in a subject in need thereof to a level comparable to a reference level derived from a control population. In particular embodiments, normalizing primary and secondary antibody responses to immunization can include increasing the level of IgA, IgM, and/or IgG in a subject in need thereof to a level greater than that of a subject in need thereof not administered a gene therapy described herein. The level of IgA, IgM, and/or IgG can be measured by, for example, an immunoglobulin test. In particular embodiments, the immunoglobulin test includes antibodies binding IgG, IgA, IgM, kappa light chain, lambda light chain, and/or heavy chain. In particular embodiments, the immunoglobulin test includes serum protein electrophoresis, immunoelectrophoresis, radial immunodiffusion, nephelometry and turbidimetry. Commercially available immunoglobulin test kits include MININEPH™ (Binding site, Birmingham, UK), and immunoglobulin test systems from Dako (Glostrup, Denmark) and Dade Behring (Marburg, Germany). In particular embodiments, a sample that can be used to measure immunoglobulin levels includes a blood sample, a plasma sample, a cerebrospinal fluid sample, and a urine sample.

[0474] In particular embodiments, therapeutically effective amounts may provide function to immune and other blood cells, reduce or eliminate an immune-mediated condition; and/or reduce or eliminate a symptom of the immune-mediated condition.

[0475] In particular embodiments, particular methods of use include the treatment of conditions wherein corrected cells have a selective advantage over non-corrected cells. For example, in FA and SCID, corrected cells have an advantage and only transducing the therapeutic gene into a “few” HSPCs is sufficient for therapeutic efficacy.

[0476] The actual dose and amount of a therapeutic formulation and/or composition administered to a particular subject can be determined by a physician, veterinarian, or researcher taking into account parameters such as physical and physiological factors including target; body weight; type of condition; severity of condition; upcoming relevant events, when known; previous or concurrent therapeutic interventions; idiopathy of the subject; and route of administration, for example. In addition, in vitro and in vivo assays can optionally be employed to help identify optimal dosage ranges.

[0477] Therapeutically effective amounts of cell-based compositions can include 10⁴ to 10⁹ cells/kg body weight, or 10³ to 10¹¹ cells/kg body weight. Exemplary doses may include greater than 10² cells, greater than 10³ cells, greater than 10⁴ cells, greater than 10⁵ cells, greater than 10⁶ cells, greater than 10⁷ cells, greater than 10⁸ cells, greater than 10⁹ cells, greater than 10¹⁰ cells, or greater than 10¹¹ cells.

[0478] Therapeutically effective amounts of protein-based compounds within CD33 targeting compositions can include 0.1 to 5 μg or μg/kg, or from 0.5 to 1 μg/kg. In other examples, a dose can include 1 μg or μg/kg, 15 μg or μg/kg, 30 μg or μg/kg, 50 μg or μg/kg, 55 μg or μg/kg, 70 μg or μg/kg, 90 μg or μg/kg, 150 μg or μg/kg, 350 μg or μg/kg, 500 μg or μg/kg, 750 μg or μg/kg, 1000 μg or μg/kg, 0.1 to 5 mg/kg or from 0.5 to 1 mg/kg. In other examples, a dose can include 1 mg/kg, 10 mg/kg, 30 mg/kg, 50 mg/kg, 70 mg/kg, 100 mg/kg, 300 mg/kg, 500 mg/kg, 700 mg/kg, 1000 mg/kg or more.

[0479] Therapeutically effective amounts can be administered through any appropriate administration route such as by, injection, infusion, perfusion, and more particularly by administration by one or more of bone marrow, intravenous, intradermal, intraarterial, intranodal, intralymphatic, intraperitoneal injection, infusion, or perfusion). Administration of CD33-targeting agents can additionally be through oral administration, inhalation, or implantation.

[0480] Therapeutically effective amounts can be achieved by administering single or multiple doses during the course of a treatment regimen, depending on, for example, the particular treatment protocol being implemented. In particular embodiments, the treatment protocol may be dictated by a clinical trial protocol or an FDA-approved treatment protocol.

[0481] As disclosed herein, applications of the present disclosure that include, e.g., base editing compositions for inactivation of CD33 and uses thereof, provide various benefits, e.g., as compared to reference CRISPR editing systems (e.g., a CRISPR editing system with a same or similar editing target site). In various embodiments, base editing systems and uses thereof disclosed herein do not cause and/or are less prone to double-stranded DNA breaks, and/or cause fewer or at a lower rate, and can entail a decreased risk of translocation and/or intra-chromosomal rearrangement compared to a reference CRISPR editing system. In various embodiments, base editing systems and uses thereof disclosed herein do not cause and/or are less prone to causing deletion of one or more nucleotide positions at target base editing sites compared to a reference CRISPR editing system. In various embodiments, base editing systems and uses thereof disclosed herein do not cause, and/or are less prone to causing, and/or causes a reduced DNA emergency repair response (e.g., reduced emergency response agent activity and/or expression as compared to a reference CRISPR editing system). Reduced DNA damage caused by base editing systems as compared to reference CRISPR editing systems accordingly reduces risk of future malignancy, e.g., malignancy resulting directly or indirectly from DNA damage caused by, or off-target effects of, an editing system.

[0482] Moreover, base editing systems of the present disclosure are able to edit multiple target sites in a single cell using multiple gRNAs that are simultaneously present and/or expressed in the single cell. This contrasts with CRISPR systems that typically cause high levels of genotoxicity under conditions in which multiple gRNAs are simultaneously present and/or expressed for CRISPR editing of multiple target sites in a single cell. Accordingly, the present disclosure includes the recognition that methods and compositions of the present disclosure that include base editing systems for inactivation of CD33 can be multiplexed with use of gRNAs corresponding to additional editing targets in single cells (e.g., additional editing targets that contribute to treatment of a condition or disease) can be used with significantly lower genotoxicity and/or cytotoxicity as compared to use of reference multiplexed CRISPR editing systems.

[0483] Further advantages of base editing compositions and methods of the present disclosure reduce or eliminate the need for genotoxic preconditioning prior to or in association with therapy, e.g., to ablate, reduce, and/or eliminate HSC and/or HSPC cells and populations, e.g., prior to a treatment such as an HSC transplant, HSPC transplant, bone marrow transplant, administration of ex vivo engineered HSCs and/or HSPCs, and/or in vivo engineering of HSCs and/or HSPCs.

[0484] Those of skill in the art will appreciate from the present disclosure that base edited HSCs (e.g., CD33 base edited cells) in various embodiments demonstrate superior survival and/or proliferation in vivo as compared to reference HSCs edited by CRISPR editing systems. Moreover, the present disclosure includes recognition of the surprising differential in in vivo survival, proliferation, and/or engraftment of HSCs edited by a base editing system as compared to reference HSCs edited by CRISPR editing system. Methods of measuring HSC survival, proliferation, and/or engraftment are known in the art and disclosed herein. Those of skill in the art will appreciate from the present disclosure that survival and/or proliferation (and thereby genotoxicity and/or cytotoxicity) can be measured, e.g., as percentage of engineered HSCs in a subject to which engineered HSCs were administered, e.g., as measured by flow cytometry or sequencing approaches, or by in vivo, in vivo, or ex vivo measurement of cell survival over time, e.g., in culture, e.g., in culture comprising an admixture of engineered and non-engineered cells.

[0485] The Exemplary Embodiments and Examples below are included to demonstrate particular embodiments of the disclosure. Those of ordinary skill in the art will recognize in light of the present disclosure that many changes can be made to the specific embodiments disclosed herein and still obtain a like or similar result without departing from the spirit and scope of the disclosure.

### First Set of Exemplary Embodiments

[0486] 1. A cell genetically modified with a base-editing system wherein the genetic modification reduces CD33 expression.
2. A cell of embodiment 1, wherein the base-editing system includes a cytosine-base editing system that replaces guanine/cytosine base pair with an adenine/thymine base pair.
3. A cell of embodiment 2, wherein the cytosine-base editing system includes cytosine deaminase.
4. A cell of embodiment 1, wherein the base-editing system includes a CRISPR-based nuclease, a zinc finger nuclease or a transcription activator like effector nuclease.
5. A cell of embodiment 4, wherein the nuclease has nickase function.
6. A cell of embodiment 4, wherein the CRISPR-based nuclease includes Cas9.
7. A cell of embodiment 1, wherein the base-editing system includes a DNA glycosylate inhibitor.
8. A cell of embodiment 7, wherein the DNA glycosylate inhibitor includes a uracil DNA glycosylate inhibitor.
9. A cell of embodiment 1, wherein the base-editing system is selected from BEI, BE2, BE3, HF-BE3, BE4, BE4max, BE4-GAM, YE1-BE3, EE-BE3, YE2-BE3, YEE-BE3, VQR-BE3, VRER-BE3, Sa-BE3, SA-BE4, SaBE4-Gam, SaKKH-BE3, Cas12a-BE, Target-AID, Target-AID-NG, xBE3, eA3A-BE3, A3A-BE3, and BE-PLUS.
10. A cell of embodiment 1, wherein the base-editing system is BE4max and/or SaBE4-Gam.
11. A cell of embodiment 1, wherein the genetic modification inactivates the intron1 splicing donor site of CD33.
12. A cell of embodiment 1, wherein the genetic modification results in introduction of a stop codon within the CD33-coding sequence.
13. A cell of embodiment 1, wherein the genetic modification results in introduction of a stop codon within exon 2 of the CD33-coding sequence.
14. A cell of embodiment 1, wherein the cell is a hematopoietic stem and progenitor cell (HSPC).
15. A cell of embodiment 1, wherein the cell is a CD34+CD45RA-CD90+ HSC.
16. A cell of embodiment 1, further genetically modified to include a therapeutic gene.
17. A cell of embodiment 16, wherein the therapeutic gene includes FancA, FancB, FancC, FancD1, FancD2, FancE, FancF, FancG, Fancl, FancJ, FancL, FancM, FancN, FancO, FancP, FancQ, FancR, FancS, FancT, FancU, FancV, or FancW or encodes a checkpoint inhibitor, a gene editing molecule, a chimeric antigen receptor that specifically binds a cellular antigen (e.g. a cancer antigen or a viral antigen), and/or a T-cell receptor that specifically binds a cellular antigen (e.g. a cancer antigen or a viral antigen).
18. A cell of embodiment 16, wherein the therapeutic gene includes □C, JAK3, IL7RA, RAG1, RAG2, DCLRE1C, PRKDC, LIG4, NHEJ1, CD3D, CD3E, CD3Z, CD3G, PTPRC, ZAP70, LCK, AK2, ADA, PNP, WHN, CHD7, ORAI1, STIM1, CORO1A, CIITA, RFXANK, RFX5, RFXAP, RMRP, DKC1, TERT, TINF2, DCLRE1B, or SLC46A1.
19. A cell of embodiment 16, wherein the therapeutic gene includes factor VIII (FVIII), FVII, von Willebrand factor (VWF), FI, FII, FV, FX, FXI, or FXIII).
20. A cell of embodiment 16, wherein the therapeutic gene includes F8 or F9.
21. A cell of embodiment 16, wherein the therapeutic gene includes γ-globin; soluble CD40; CTLA; Fas L; antibodies to CD4, CD5, CD7, CD52, etc.; antibodies to IL1, IL2, IL6; an antibody to TCR specifically present on autoreactive T cells; IL4; IL10; IL12; IL13; ID Ra, sIL1RI, sIL1RII; sTNFRI; sTNFRII; antibodies to TNF; P53, PTPN22, and DRB1*1501/DQB1*0602; globin family genes; WAS; phox; dystrophin; pyruvate kinase (PK); CLN3; ABCD1; arylsulfatase A (ARSA); SFTPB; SFTPC; NLX2.1; ABCA3; GATA1; ribosomal protein genes; TERC; CFTR; LRRK2; PARK2; PARK7; PINK1; SNCA; PSEN1; PSEN2; APP; SOD1; TDP43; FUS; ubiquilin 2; or C9ORF72.
22. A cell of embodiment 16, wherein the therapeutic gene includes ABLI, AKT1, APC, ARSB, BCL11A, BLC1, BLC6, BRCA1, BRCA2, BRIP1, C46, CAS9, C-CAM, CBFAI, CBL, CCR5, CD19, CDA, C-MYC, CRE, CSCR4, CSFIR, CTS-I, CYB5R3, DCC, DHFR, DLL1, DMD, EGFR, ERBA, ERBB, EBRB2, ETSI, ETS2, ETV6, FCC, FGR, FOX, FUSI, FYN, GALNS, GLB1, GNS, GUSB, HBB, HBD, HBE1, HBG1, HBG2, HCR, HGSNAT, HOXB4, HRAS, HYAL1, ICAM-1, iCaspase, IDUA, IDS, JUN, KLF4, KRAS, LYN, MCC, MDM2, MGMT, MLL, MMACI, MYB, MEN-I, MEN-II, MYC, NAGLU, NANOG, NF-1, NF-2, NKX2.1, NOTCH, OCT4, p16, p2I, p27, p57, p73, PALB2, RAD51C, ras, at least one of RPL3 through RPL40, RPLPO, RPLP1, RPLP2, at least one of RPS2 through RPS30, RPSA, SGSH, SLX4, SOX2, VHL, or WT-I.
23. A pharmaceutical formulation including a cell or population of cells of embodiment 1 and a pharmaceutically acceptable carrier.
24. A kit including a cell of embodiment 1 and a CD33-targeting agent.
25. A kit of embodiment 24, wherein the CD33-targeting agent includes an anti-CD33 antibody, an anti-CD33 immunotoxin, an anti-CD33 antibody-drug conjugate, an anti-CD33 antibody-radioisotope conjugate, an anti-CD33 bispecific antibody, an anti-CD33 bispecific immune cell engaging antibody, an anti-CD33 trispecific antibody, and/or an anti-CD33 chimeric antigen receptor (CAR) with one or more binding domains.
26. A kit of embodiment 24, wherein the CD33-targeting agent includes hp67.6, lintuzumab, SGN-CD33A, and/or AMG 330.
27. A kit of embodiment 24, wherein the CD33-targeting agent includes a binding domain derived from hp67.6, lintuzumab, SGN-CD33A, and/or AMG 330.
28. A kit of embodiment 24, wherein the CD33-targeting agent includes the CDRs of hp67.6, lintuzumab, SGN-CD33A, and/or AMG 330.
29. A kit of embodiment 24, wherein the CD33-targeting agent includes an antibody-drug conjugate or an antibody-radioisotope conjugate wherein the drug or radioisotope are selected from taxol, taxane, cytochalasin B, gramicidin D, ethidium bromide, emetine, mitomycin, etoposide, tenoposide, vincristine, vinblastine, colchicin, doxorubicin, daunorubicin, dihydroxy anthracinedione, mitoxantrone, mithramycin, maytansinoid, dolastatin, auristatin, calicheamicin, pyrrolobenzodiazepine, nemorubicin PNU-159682, anthracycline, vinca alkaloid, trichothecene, CC1065, camptothecin, elinafide, actinomycin D, 1-dehydrotestosterone, glucocorticoids, procaine, tetracaine, lidocaine, propranolol, puromycin, ricin, CC-1065, duocarmycin, diphtheria toxin, snake venom, cobra venom, mistletoe lectin, modeccin, pokeweed antiviral protein, saporin, Bryodin 1, bouganin, gelonin, Pseudomonas exotoxin, iodine-131, indium-111, yttrium-90, lutetium-177, astatine-211, bismuth-212, and/or bismuth-213 and/or wherein the antibody-drug conjugate includes GO.
30. A kit of embodiment 24, wherein the CD33-targeting agent includes a linker.
31. A kit of embodiment 24, wherein the CD33-targeting agent includes a bispecific antibody including a combination of binding variable chains or a binding CDR combination of hp67.6, lintuzumab, SGN-CD33A, and/or AMG 330.
32. A kit of embodiment 24, wherein the CD33-targeting agent includes a bispecific antibody including at least one binding domain that activates an immune cell.
33. A kit of embodiment 32, wherein the immune cell is a T-cell, natural killer (NK) cell, or a macrophage.
34. A kit of embodiment 32, wherein the binding domain that activates an immune cell binds CD3, CD28, CD8, NKG2D, CD8, CD16, KIR2DL4, KIR2DS1, KIR2DS2, KIR3DS1, NKG2C, NKG2E, NKG2D, NKp30, NKp44, NKp46, NKp80, DNAM-1, CD11b, CD11c, CD64, CD68, CD119, CD163, CD206, CD209, F4/80, IFGR2, Toll-like receptors 1-9, IL-4Ra, or MARCO.
35. A kit of embodiment 32, wherein the binding domains of the bispecific antibody are joined through a linker.
36. A kit of embodiment 24, wherein the CD33-targeting agent includes a chimeric antigen receptor (CAR) including a binding domain that specifically binds CD33.
37. A kit of embodiment 36, wherein the effector domain of the CAR is selected from 4-1BB, CD3E, CD3δ, CD3ζ, CD27, CD28, CD79A, CD79B, CARD11, DAP10, FcRα, FcRβ, FcRγ, Fyn, HVEM, ICOS, Lck, LAG3, LAT, LRP, NOTCH1, Wnt, NKG2D, OX40, ROR2, Ryk, SLAMF1, Slp76, pTα, TCRα, TCRβ, TRIM, Zap70, PTCH2, or any combination thereof.
38. A kit of embodiment 36, wherein the CAR includes a cytoplasmic signaling sequence derived from CD3 zeta, FcR gamma, CD3 gamma, CD3 delta, CD3 epsilon, CDS, CD22, CD79a, CD79b, or CD66d.
39. A kit of embodiment 36, wherein the CAR includes an intracellular signaling domain and a costimulatory signaling region.
40. A kit of embodiment 36, wherein the costimulatory signaling region includes the intracellular domain of CD27, CD28, 4-1 BB, OX40, CD30, CD40, lymphocyte function-associated antigen-1, CD2, CD7, LIGHT, NKG2C, or B7-H3.
41. A kit of embodiment 36, wherein the CAR includes a spacer region.
42. A kit of embodiment 36, wherein the CAR includes a transmembrane domain.
43. A method of genetically-modifying a cell to have reduced CD33 expression including exposing the cell to an effective amount of a base-editing system that reduces CD33 expression.
44. A method of embodiment 43, wherein the base-editing system is a cytosine-base editing system that replaces guanine/cytosine base pair with an adenine/thymine base pair.
45. A method of embodiment 44, wherein the cytosine-base editing system includes cytosine deaminase.
46. A method of embodiment 43, wherein the base-editing system includes a CRISPR-based nuclease, a zinc finger nuclease or a transcription activator like effector nuclease.
47. A method of embodiment 46, wherein the nuclease has nickase function.
48. A method of embodiment 46, wherein the CRISPR-based nuclease includes Cas9.
49. A method of embodiment 43, wherein the base-editing system includes a DNA glycosylate inhibitor.
50. A method of embodiment 49, wherein the DNA glycosylate inhibitor includes a uracil DNA glycosylate inhibitor.
51. A method of embodiment 43, wherein the base-editing system is selected from BE1, BE2, BE3, HF-BE3, BE4, BE4max, BE4-GAM, YE1-BE3, EE-BE3, YE2-BE3, YEE-BE3, VQR-BE3, VRER-BE3, Sa-BE3, SA-BE4, SaBE4-Gam, SaKKH-BE3, Cas12a-BE, Target-AID, Target-AID-NG, xBE3, eA3A-BE3, A3A-BE3, and BE-PLUS.
52. A method of embodiment 43, wherein the base-editing system is BE4max and/or SaBE4-Gam.
53. A method of embodiment 43, wherein the genetic modification inactivates the intron1 splicing donor site of CD33.
54. A method of embodiment 43, wherein the genetic modification results in introduction of a stop codon within the CD33-coding sequence.
55. A method of embodiment 43, wherein the genetic modification results in introduction of a stop codon within exon 2 of the CD33-coding sequence.
56. A method of embodiment 43, wherein the cell is a hematopoietic stem and progenitor cell (HSPC).
57. A method of embodiment 43, wherein the cell is a CD34+CD45RA-CD90+ HSC.
58. A method of embodiment 43, wherein the cell is a therapeutic cell.
59. A method of embodiment 43, wherein the cell includes a genetic modification that results in inclusion of a therapeutic gene.
60. A method of embodiment 59, wherein the therapeutic gene is recited in one of embodiments 17, 18, 19, 20, or 21.
61. A method for treating a subject in need thereof with a pharmaceutical formulation of embodiment 23 including administering a therapeutically effective amount of the pharmaceutical formulation to the subject thereby treating the subject.
62. A method of embodiment 61, wherein the treating provides a therapeutically effective treatment against a primary immune deficiency.
63. A method of embodiment 61, wherein the treating provides a therapeutically effective treatment against a secondary immune deficiency.
64. A method of embodiment 61, wherein the treating provides a therapeutically effective treatment for a disorder including: FA, SCID, Pompe disease, Gaucher disease, Fabry disease, Mucopolysaccharidosis type I, familial apolipoprotein E deficiency and atherosclerosis (ApoE), viral infections, and cancer.
65. A method of embodiment 61, further including administering to the subject a CD33-targeting agent.
66. A method of embodiment 65, wherein the CD33-targeting agent includes an anti-CD33 antibody, an anti-CD33 immunotoxin, an anti-CD33 antibody-drug conjugate, an anti-CD33 antibody-radioisotope conjugate, an anti-CD33 bispecific antibody, an anti-CD33 bispecific immune cell engaging antibody, an anti-CD33 trispecific antibody, and/or an anti-CD33 chimeric antigen receptor (CAR) described in any of the preceding embodiments.

### Second Set of Exemplary Embodiments

[0487] 1. A method of selectively protecting a cell from an anti-CD33 therapeutic, the method including contacting the cell with a base editing system including a base editing enzyme and a guide RNA (gRNA), wherein the base editing system inactivates expression of CD33.
2. The method of embodiment 1, wherein the contacting includes administering to a system or subject including the cell: a nucleic acid encoding the base editing enzyme and a nucleic acid encoding the gRNA; or the base editing enzyme and the gRNA.
3. The method of embodiment 2, wherein the system is an in vitro or ex vivo cell or cell culture.
4. A method of selectively protecting a cell of a human subject from an anti-CD33 agent, the method including: administering to a human subject a viral vector including a nucleic acid sequence encoding a base editing system including a base editing enzyme and a guide RNA (gRNA), wherein the base editing system inactivates expression of CD33; and administering to the human subject the anti-CD33 agent.
5. A population of cells including a first subpopulation expressing CD33 and a second subpopulation in which CD33 expression is inactivated, wherein one or more cells of the population include at least one base editing agent of a base editing system selected from a base editing enzyme and a guide RNA (gRNA), wherein the base editing system inactivates expression of CD33, optionally wherein CD33 expression is inactivated in at least 5%, 6%, 7%, 8%, 9%, 10%, 20%, 30%, 40%, or 50% of cells of the population.
6. A cell including a base editing system including a base editing enzyme and a guide RNA (g RNA), wherein the base editing system inactivates expression of CD33.
7. A base editing system that inactivates CD33 in a cell, the base editing system including a base editing enzyme and a guide RNA (gRNA).
8. A kit including a base editing enzyme of a base editing system and a guide RNA (gRNA) of a base editing system, wherein the base editing system inactivates expression of CD33, optionally further including an anti-CD33 agent and/or instructions for inactivation of CD33 in one or more cells.
9. The method, population, cell, system, or kit of any one of embodiments 1-8, wherein the base editing system is engineered to cause a genetic modification that inactivates CD33, wherein the inactivating genetic modification includes a genetic modification at a splicing site of a nucleic acid encoding CD33, optionally wherein the splicing site is a splicing donor site or a splicing acceptor site, optionally wherein the splicing site is an intron 1 splicing donor site, an exon 2 splicing acceptor site, or an exon 3 splicing acceptor site of a nucleic acid encoding CD33.
10. The method, population, cell, system, or kit of any one of embodiments 1-8, wherein the base editing system is engineered to cause a genetic modification that inactivates CD33, wherein the inactivating genetic modification includes introduction of a stop codon within a nucleic acid encoding CD33.
11. The method, population, cell, system, or kit of embodiment 10, wherein the inactivating genetic modification includes introduction of a stop codon within exon 2 or exon 3 of a nucleic acid encoding CD33.
12. The method, population, cell, system, or kit of any one of embodiments 1-9, wherein the gRNA is engineered to cause a CD33-inactivating nucleic acid sequence modification selected from C to T at position 38 (G to A on forward strand, intron 1 splicing donor), C to T at position 481 (G to A on forward strand, intron 2 splicing donor), A to G at position 98 (exon2 splice acceptor), A to G at position 683 (exon3 splice acceptor), or A to G at position 1189 (exon4 splice acceptor) of CD33 (using SEQ ID NO: 15 as a reference).
13. The method, population, cell, system, or kit of any one of embodiments 1-12, wherein the gRNA is engineered to cause a CD33-inactivating nucleic acid sequence modification encoded by any of SEQ ID NOs: 4, 5, 19, 20, 21, and 22, optionally wherein the nucleic acid sequence modification is A to G at position −113 or A to G at position −175 of CD33.
14. The method, population, cell, system, or kit of any one of embodiments 1-13, wherein the gRNA has at least 80% sequence identity with a sequence selected from SEQ ID NOs: 4, 5, 19, 20, 21, and 22.
15. The method, population, cell, system, or kit of any one of embodiments 1-13, wherein the gRNA has at least 90% sequence identity with a sequence selected from SEQ ID NOs: 4, 5, 19, 20, 21, and 22.
16. The method, population, cell, system, or kit of any one of embodiments 1-15, wherein the base-editing system includes a cytosine base editing enzyme.
17. The method, population, cell, system, or kit of embodiment 16, wherein the gRNA is engineered to cause a CD33-inactivating nucleic acid sequence modification selected from C to T at position 38 (G to A on forward strand, intron 1 splicing donor), or C to T at position 481 (G to A on forward strand, intron 2 splicing donor) of CD33 (using SEQ ID NO: 15 as a reference).
18. The method, population, cell, system, or kit of embodiment 16 or 17, wherein the gRNA is engineered to cause a CD33-inactivating nucleic acid sequence modification encoded by any of SEQ ID NOs: 4, 5, 20, 21, and 22.
19. The method, population, cell, system, or kit of embodiment 16-18, wherein the gRNA has at least 80% sequence identity with a sequence selected from SEQ ID NOs: 4 and 5.
20. The method, population, cell, system, or kit of embodiment 16-19, wherein the gRNA has at least 90% sequence identity with a sequence selected from SEQ ID NOs: 4 and 5.
21. The method, population, cell, system, or kit of any one of embodiments 16-20, wherein the cytosine base-editing enzyme is selected from BEI, BE2, BE3, HF-BE3, BE4, BE4max, BE4-GAM, YE1-BE3, EE-BE3, YE2-BE3, YEE-BE3, VQR-BE3, VRER-BE3, Sa-BE3, SA-BE4, SaBE4-Gam, SaKKH-BE3, Cas12a-BE, Target-AID, Target-AID-NG, xBE3, eA3A-BE3, A3A-BE3, and BE-PLUS, optionally wherein the cytosine base-editing enzyme is BE4max and/or SaBE4-Gam.
22. The method, population, cell, system, or kit of any one of embodiments 1-15, wherein the base-editing system includes an adenine base editing enzyme.
23. The method, population, cell, system, or kit of embodiment 22, wherein the gRNA is engineered to cause a CD33-inactivating nucleic acid sequence modification selected from A to G at position 98 (exon2 splice acceptor), A to G at position 683 (exon3 splice acceptor), or A to G at position 1189 (exon4 splice acceptor) of CD33 (using SEQ ID NO: 15 as a reference).
24. The method, population, cell, system, or kit of embodiment 22 or 23, wherein the gRNA is engineered to cause a CD33-inactivating nucleic acid sequence modification encoded by any of SEQ ID NOs: 19, 20, 21, and 22.
25. The method, population, cell, system, or kit of embodiment 22-24, wherein the gRNA has at least 80% sequence identity with a sequence selected from SEQ ID NOs: 19, 20, 21, and 22.
26. The method, population, cell, system, or kit of embodiment 22-25, wherein the gRNA has at least 90% sequence identity with a sequence selected from SEQ ID NOs: 19, 20, 21, and 22.
27. The method, population, cell, system, or kit of any one of embodiments 22-26, wherein the adenine base editing enzyme is TadA*-dCas9, TadA-TadA*-Cas9, ABE7.9, ABE 6,3, ABE7.10, and/or ABE8e.
28. The method, population, cell, system, or kit of any one of embodiments 1-27, wherein the cell or cells are hematopoietic stem cells (HSCs).
29. The method, population, cell, system, or kit of any one of embodiments 1-27, wherein the cell or cells are hematopoietic stem and progenitor cells (HSPCs).
30. The method, population, cell, system, or kit of any one of embodiments 1-27, wherein the cell or cells are CD34+ HSCs and/or CD34+CD45RA-CD90+ HSCs.
31. The method, population, cell, system, or kit of any one of embodiments 1-30, wherein the base editing enzyme and/or gRNA are encoded by a vector. or synthesized in vitro
32. The method, population, cell, system, or kit of any one of embodiments 1-30, wherein the base editing enzyme and/or gRNA synthesized in vitro.
33. The method, population, cell, system, or kit of embodiment 31, wherein the vector is a viral vector, optionally wherein the viral vector is an adenoviral vector.
34. The method, population, cell, system, or kit embodiment 33 wherein the adenoviral vector is a helper dependent adenoviral vector.
35. The method, population, cell, system, or kit embodiment 33 or 34, wherein the adenoviral vector is a helper-dependent Ad35 viral vector.
36. The method, population, cell, system, or kit of embodiments 32-35, wherein the vector selectively targets HSCs or HSPCs.
37. The method, population, cell, system, or kit of any one of embodiments 32-36, wherein the vector further encodes a therapeutic polypeptide and/or further includes a therapeutic gene.
38. The method, population, cell, system, or kit of embodiment 37, wherein the therapeutic polypeptide is selected from a checkpoint inhibitor, a gene editing molecule, a chimeric antigen receptor that specifically binds a cellular antigen (e.g. a cancer antigen or a viral antigen), a T-cell receptor that specifically binds a cellular antigen (e.g. a cancer antigen or a viral antigen), γ-globin; soluble CD40; CTLA; Fas L; antibodies to CD4, CD5, CD7, CD52, etc.; antibodies to IL1, IL2, IL6; an antibody to TCR specifically present on autoreactive T cells; IL4; IL10; IL12; IL13; ID Ra, sIL1RI, sIL1RII; sTNFRI; sTNFRII; antibodies to TNF; P53, PTPN22, and DRB1*1501/DQB1*0602; globin family genes; WAS; phox; dystrophin; pyruvate kinase (PK); CLN3; ABCD1; arylsulfatase A (ARSA); SFTPB; SFTPC; NLX2.1; ABCA3; GATA1; ribosomal protein genes; TERC; CFTR; LRRK2; PARK2; PARK7; PINK1; SNCA; PSEN1; PSEN2; APP; SOD1; TDP43; FUS; ubiquilin 2; C9ORF72, von Willebrand factor (VWF), FI, FII, FV, FVII, factor VIII (FVIII), FIX, FX, FXI, and/or FXIII, optionally wherein the therapeutic polypeptide is selected from FVIII and/or FIX.
39. The method, population, cell, system, or kit of embodiment 37, wherein the therapeutic gene is selected from FancA, FancB, FancC, FancD1, FancD2, FancE, FancF, FancG, Fancl, FancJ, FancL, FancM, FancN, FancO, FancP, FancQ, FancR, FancS, FancT, FancU, FancV, FancW, γC, JAK3, IL7RA, RAG1, RAG2, DCLRE1C, PRKDC, LIG4, NHEJ1, CD3D, CD3E, CD3Z, CD3G, PTPRC, ZAP70, LCK, AK2, ADA, PNP, WHN, CHD7, ORAI1, STIM1, CORO1A, CIITA, RFXANK, RFX5, RFXAP, RMRP, DKC1, TERT, TINF2, DCLRE1B, SLC46A1, ABLI, AKT1, APC, ARSB, BCL11A, BLC1, BLC6, BRCA1, BRCA2, BRIP1, C46, CAS9, C-CAM, CBFAI, CBL, CCR5, CD19, CDA, C-MYC, CRE, CSCR4, CSFIR, CTS-I, CYB5R3, DCC, DHFR, DLL1, DMD, EGFR, ERBA, ERBB, EBRB2, ETSI, ETS2, ETV6, FCC, FGR, FOX, FUSI, FYN, GALNS, GLB1, GNS, GUSB, HBB, HBD, HBE1, HBG1, HBG2, HCR, HGSNAT, HOXB4, HRAS, HYAL1, ICAM-1, iCaspase, IDUA, IDS, JUN, KLF4, KRAS, LYN, MCC, MDM2, MGMT, MLL, MMACI, MYB, MEN-I, MEN-II, MYC, NAGLU, NANOG, NF-1, NF-2, NKX2.1, NOTCH, OCT4, p16, p2I, p27, p57, p73, PALB2, RAD51C, ras, at least one of RPL3 through RPL40, RPLPO, RPLP1, RPLP2, at least one of RPS2 through RPS30, RPSA, SGSH, SLX4, SOX2, VHL, and/or WT-I.
40. A population of cells including a first subpopulation expressing CD33 and a second subpopulation in which CD33 expression is inactivated, wherein one or more cells includes an inactivated CD33 gene including a nucleic acid sequence according to one or more of SEQ ID NOs: SEQ ID NOs: 4, 5, 19, 20, 21, or 22, optionally wherein CD33 expression is inactivated in at least 5%, 6%, 7%, 8%, 9%, 10%, 20%, 30%, 40%, or 50% of cells of the population, optionally wherein the cells are HSCs, HSPCs, CD34+ HSCs, and/or CD34+CD45RA-CD90+ HSCs.
41. A cell including an inactivated CD33 gene including a nucleic acid sequence according to one or more of SEQ ID NOs: SEQ ID NOs: 4, 5, 19, 20, 21, or 22, optionally wherein the cell is an HSC, HSPC, CD34+ HSC, and/or CD34+CD45RA-CD90+ HSC.
42. The method, population, cell, system, or kit of any one of embodiments 1-41, wherein one or more of the cell or cells is contacted with an anti-CD33 agent.
43. A pharmaceutical formulation including a population, cell, system, or kit of any one of embodiments 5-42 and a pharmaceutically acceptable carrier.
44. A method of treating a subject in need thereof, the method including administering to the subject a population, cell, system, kit, or pharmaceutical formulation of any one of embodiments 5-43.
45. The method of embodiment 44, wherein the method includes administering to the subject an anti-CD33 agent.
46. The method of embodiment 44 or 45, wherein the subject is need of treatment for a primary immune deficiency, a secondary immune deficiency, or a disorder selected from FA, SCID, Pompe disease, Gaucher disease, Fabry disease, Mucopolysaccharidosis type I, familial apolipoprotein E deficiency and atherosclerosis (ApoE), viral infections, and/or cancer.
47. The method of embodiment 44 or 45, wherein the subject is need of treatment for a hematology condition, optionally wherein the hematology condition is a platelet disorder, a bone marrow failure condition, a red cell disorder, an autoimmune hematology, a primary immunodeficiency, or an inborn error of metabolism.
48. The method of embodiment 44 or 45, wherein the subject is need of treatment for a hematology condition selected from Bernard-Soulier syndrome, Glanzmann thrombasthenia, Diamond-Blackfan anemia, pyruvate kinase deficiency, acquired thrombotic thrombocytopenic purpura (aTTP), congenital thrombotic thrombocytopenic purpura (cTTP), Wiskott-Aldrich syndrome (WAS), Severe combined immunodeficiency due to adenosine deaminase deficiency (ADA-SCID), X-linked severe combined immunodeficiency (SCID-X1), DOCK 8 deficiency, major histocompatibility complex class II deficiency (MHC-II), CD40/CD40L deficiency, hereditary hemochromatosis, and phenylketonuria (PKU).
49. The method, population, cell, system, or kit of any one of embodiments 42-48, wherein the anti-CD33 agent includes an anti-CD33 antibody, an anti-CD33 immunotoxin, an anti-CD33 antibody-drug conjugate, an anti-CD33 antibody-radioisotope conjugate, an anti-CD33 bispecific antibody, an anti-CD33 bispecific immune cell engaging antibody, an anti-CD33 trispecific antibody, an anti-CD33 chimeric antigen receptor (CAR) with one or more binding domains, hp67.6, lintuzumab, SGN-CD33A, and/or AMG 330.
50. The method, population, cell, system, or kit of any one of embodiments 42-48, wherein the anti-CD33 agent includes a binding domain derived from hp67.6, lintuzumab, SGN-CD33A, and/or AMG 330, wherein the anti-CD33 agent includes one or more, or all, CDRs of hp67.6, lintuzumab, SGN-CD33A, and/or AMG 330, and/or wherein the anti-CD33 agent includes a bispecific antibody including a combination of binding variable chains or a binding CDR combination of hp67.6, lintuzumab, SGN-CD33A, and/or AMG 330.
51. The method, population, cell, system, or kit of any one of embodiments 42-48, wherein the anti-CD33 agent includes an antibody-drug conjugate or an antibody-radioisotope conjugate wherein the drug or radioisotope are selected from taxol, taxane, cytochalasin B, gramicidin D, ethidium bromide, emetine, mitomycin, etoposide, tenoposide, vincristine, vinblastine, colchicin, doxorubicin, daunorubicin, dihydroxy anthracinedione, mitoxantrone, mithramycin, maytansinoid, dolastatin, auristatin, calicheamicin, pyrrolobenzodiazepine, nemorubicin PNU-159682, anthracycline, vinca alkaloid, trichothecene, CC1065, camptothecin, elinafide, actinomycin D, 1-dehydrotestosterone, glucocorticoids, procaine, tetracaine, lidocaine, propranolol, puromycin, ricin, CC-1065, duocarmycin, diphtheria toxin, snake venom, cobra venom, mistletoe lectin, modeccin, pokeweed antiviral protein, saporin, Bryodin 1, bouganin, gelonin, Pseudomonas exotoxin, iodine-131, indium-111, yttrium-90, lutetium-177, astatine-211, bismuth-212, and/or bismuth-213 and/or wherein the antibody-drug conjugate includes GO.
52. The method, population, cell, system, or kit of any one of embodiments 42-48, wherein the CD33-targeting agent includes a bispecific antibody including at least one binding domain that activates an immune cell, optionally wherein the immune cell is a T-cell, natural killer (NK) cell, or a macrophage and//or wherein the binding domain that activates an immune cell binds CD3, CD28, CD8, NKG2D, CD8, CD16, KIR2DL4, KIR2DS1, KIR2DS2, KIR3DS1, NKG2C, NKG2E, NKG2D, NKp30, NKp44, NKp46, NKp80, DNAM-1, CD11 b, CD11 c, CD64, CD68, CD119, CD163, CD206, CD209, F4/80, IFGR2, Toll-like receptors 1-9, IL-4Ra, or MARCO, optionally wherein the binding domains of the bispecific antibody are joined through a linker.
53. The method, population, cell, system, or kit of any one of embodiments 42-48, wherein the CD33-targeting agent includes a chimeric antigen receptor (CAR) including a binding domain that specifically binds CD33.
54. The method, population, cell, system, or kit of embodiment 53, wherein: the CAR includes an effector domain selected from 4-1BB, CD3ε, CD3δ, CD3, CD27, CD28, CD79A, CD79B, CARD11, DAP10, FcRα, FcRβ, FcRγ, Fyn, HVEM, ICOS, Lck, LAGS, LAT, LRP, NOTCH1, Wnt, NKG2D, OX40, ROR2, Ryk, SLAMF1, Slp76, pTα, TCRα, TCRβ, TRIM, Zap70, PTCH2, or any combination thereof; the CAR includes a cytoplasmic signaling sequence derived from CD3 zeta, FcR gamma, CD3 gamma, CD3 delta, CD3 epsilon, CDS, CD22, CD79a, CD79b, or CD66d; the CAR includes an intracellular signaling domain and a costimulatory signaling region, optionally wherein the costimulatory signaling region includes the intracellular domain of CD27, CD28, 4-1 BB, OX40, CD30, CD40, lymphocyte function-associated antigen-1, CD2, CD7, LIGHT, NKG2C, or B7-H3; the CAR includes a spacer region; and/or the CAR includes a transmembrane domain.
55. The method, population, cell, system, or kit of any one of embodiments 42-54s wherein the anti-CD33 agent includes a linker.

### EXAMPLES

[0488] CD33 is a polypeptide known to be expressed by, among other cell types, HSCs. The present disclosure recognizes that engineering of HSCs in general presents a valuable avenue for treatment of many medical conditions. In various such treatments, HSCs can be administered as a therapeutic, and in certain embodiments can be engineered in vitro, ex vivo, or in vivo to introduce a therapeutic genetic modification that addresses a medical condition of interest. The present disclosure includes that CD33 inactivation in HSCs can provide a means of advantageously selecting or selectively protecting therapeutic cells. As provided herein, base editing of CD33 can inactivate CD33 expression by HSCs, whereby upon administration of an anti-CD33 agent that selectively kills, or otherwise inhibits growth and/or proliferation of CD33-expressing cells, CD33-inactivated HSCs are selected for. The present Examples demonstrate that inactivation of CD33 in HSCs by base editing provides an efficient, effective, and advantageous method of producing CD33-inactivated HSCs. Inactivation of CD33 by base editing, in contrast with CRISPR editing, can be multiplexed with additional concurrent base edits in individual cells, e.g., further therapeutic base edits including in other genes and optionally on other chromosomes. Inactivation of CD33 by base editing, in contrast with CRISPR editing, produces a population of cells capable of efficient engraftment and/or survival and/or differentiation in vivo.

### Example 1: Inactivation of CD33 by Base Editors

[0489] The present Example demonstrates that base editors of the present disclosure efficiently inactivate CD33 in target cells and can concurrently edit multiple targets in the same cell, e.g., a CD33 inactivating edit and a further therapeutic edit.

[0490] FIG. 1 provides exemplary polypeptide sequences of CD33 (through the transmembrane domain, but lacking the cytoplasmic domain) from Macaca fascicularis (SEQ ID NO: 1), Homo sapiens (SEQ ID NO: 2), and Mus musculus (SEQ ID NO: 3), aligned and annotated. The amino acid sequence of a full length human CD33 polypeptide is shown in SEQ ID NO: 14; additional full length sequences of representative CD33 proteins are shown in SEQ ID NO: 169 (Macaca mulatta), SEQ ID NO: 170 (Macaca fascicularis), and SEQ ID NO: 171 (Mus musculus).

[0491] The amino acid sequence of a truncated CD33 polypeptide (CD33^{ΔE2}) including an engineered deletion of E2, which includes functional deletion of a V-set Ig-like domain of CD33 with which many anti-CD33 agents bind, is shown in SEQ ID NO: 17. Binding of anti-CD33 antibodies to the V-set Ig-like domain, C2-set Ig-like domain, or an engineered tag is illustrated in FIG. 2A. A schematic of a particular anti-CD33 antibody-drug conjugate, gemtuzumab ozogamicin (GO), is provided in FIG. 2B.

[0492] In the present Example, base editor enzymes were delivered to human or NHP cells in the form of messenger RNA (mRNA) and stored as frozen aliquots in a −20° C. freezer; or in the form of protein purified using immobilized metal affinity chromatography followed by cation exchange chromatography. FIGS. 12A and 12B are schematic drawings of the ABE8e (FIG. 12A; Addgene #138489; SEQ ID NO: 6) and the ABE8e-NG (FIG. 12B; Addgene #138491; SEQ ID NO: 7) plasmids, from which ABE8e was expressed. The development of ABE8e, and of these two plasmids, is described in Richter et al. (Nat. Biotech. 38(7):883-891, 2020).

[0493] Base editor mRNA was delivered to target cells together with guide RNAs (gRNAs) synthesized to include 2′-O-methyl analogs at each of the first three 5′ and the first three 3′ terminal RNA residues and to include 3′ phosphorothioate internucleotide linkages at each of the first three 5′ and the first three 3′ terminal RNA linkages. These modifications reduce the susceptibility of the gRNA to degradation in cells.

[0494] gRNAs were custom-ordered from Synthego (Redwood City, Calif.), shipped as lyophilized materials, resuspended in purified water upon arrival and stored as frozen aliquots in a -80 QC freezer. Target editing sites in the gamma globin (HBG) genes were selected within the promoter region to introduce sequence modifications at position -113 and/or at position -175; modification from A to G at these target editing site nucleotides (via deamination using ABE8e) reduces or prevents binding of a repressor (BCL11A) and thereby will result in increased expression of the fetal hemoglobin genes. Table 11 provides the sequences of three ABE8e gRNA targets were utilized; the positions targeted for edits are shown bold.

TABLE 11

| | | | SEQ ID | |
|---|---|---|---|---|
| Name | Sequence* | type | NO | Purpose |
| HBG-113 | CUUGACCAAUAGCCUUGACA | ABE | 137 | relevant for |
| HBG-175 | AGAUAUUUGCAUUGAGAUAG | ABE | 138 | hemoglobinopathies |
| | | | | therapy |
| CD33E2 splice | CCCCACAGGGGCCCUGGCUA | ABE | 19 | CD33 knockdown |

*Each gRNA was synthesized in vitro with the groups 2′-O-methyl analogs and 3′ phosphorothioate internucleotide linkages at the first three 5′ and 3′ terminal RNA residues.

[0495] FIGS. 13A-13B illustrate this system for targeting of two HBG promoter target editing sites with ABE8e in nonhuman primate NHP CD34+ cells for the reactivation of fetal hemoglobin. FIG. 13A is a schematic of HBG target sites.

[0496] Ribonucleoproteins (RNP) were formed by combining 180 pmol of ABE8e protein with 1800 pmol of gRNA at room temperature for 10 min and used for the electroporation of 3 million cells in 2-mm cuvettes following the manufacturer's instructions (Harvard Apparatus, Holliston, Mass.).

[0497] RNP or mRNA encoding BE were delivered to CD34+ cells via electroporation, which minimizes toxicity and temporally limits exposure to the mutagenic editing reagent.

[0498] For colony forming cell (CFC) assays, 1000 to 1200 sorted cells were seeded into 3.5 ml ColonyGEL 1402 (ReachBio). Hematopoietic colonies were scored after 12 to 14 days. Arising colonies were identified as colony-forming unit (CFU) granulocyte (CFU-G), CFU macrophage (CFU-M), CFU granulocyte-macrophage (CFU-GM), and burst-forming unit-erythrocyte (BFU-E). Colonies consisting of erythroid and myeloid cells were scored as CFU-MIX.

[0499] Editing at both CD33-inactivating and therapeutic target sites was quantified by next generation sequencing (NGS) using Illumina barcoded, 2×150 base pair (bp) pair-end MiSeq primers for complete sequencing (Illumina) or by EditR analysis (Kluesner et al., CRISPR J. 1(3):239-250, 2018; PMID: 31021262) of bulk cell populations and also of clonal hematopoietic colonies to determine the rates of simultaneous edits within the same cell.

[0500] Results:

[0501] Data demonstrate efficient modification by base editing of nucleotides at target editing sites in CD34+ cells to inactivate CD33, increase gamma globin expression, or both. Concurrent multiplexed base editing of multiple targets is also demonstrated for CD33 inactivation and a further therapeutic edit, in particular base editing to increase expression of gamma globin.

[0502] FIG. 13B is a pair of result tables showing editing efficiency measured by EditR analysis (Kluesner et al., CRISPR J. 1(3):239-250, 2018; PMID: 31021262). As shown in FIG. 13B, additional nucleotides within the editing target site of the tested gRNAs are also modified. Arrows show the position of edits; starred (★) boxes show frequencies of the targeted edits.

[0503] FIGS. 14A-14F show efficient CD33 knockdown with ABE8e. FIG. 14A shows targeting of CD33 splicing site (exon2 acceptor site) with ABE8e in NHP CD34+ cells. FIG. 14B is an illustration of conservation of the 3′ acceptor site; the AG that are boxed are universal, and therefore an excellent target for editing. The splicing acceptor site in exon 2 is inactivated, by editing the AG donor site to GG. FIG. 14C-14E show the editing efficiency of the CD33 target site, measured by EditR, in non-human primate (NHP) CD34+ cells mock treated (FIG. 14C), treated with ABE8e protein (FIG. 14D) or with ABE8e mRNA (FIG. 14E). Arrows show the position of edits; starred (★) boxes show frequencies. FIG. 14F shows flow cytometry analysis of CD33 surface expression in NHP CD34+ cells at six days post-treatment. (T234 rhesus CD34+ (6 days post EP)). The editing efficiency achieved using this system is both specific and unexpectedly high; the efficiency is on a par with rates that might be achieved with CRISPR editing.

[0504] FIGS. 15A, 15B are a pair of graphs illustrating multiplex ABE8e HBG/CD33 editing in human fetal liver (FL) CD34+ cells. Cells were edited with ABE8e mRNA and single guide RNA (sgRNA) targeting each of the CD33 and HBG-175 sites. Editing efficiency was measured by next generation sequencing (NGS) at the CD33 (FIGS. 15A and 15B) or HBG-175 (FIGS. 15C-15E) sites. Graphs show editing frequency at each nucleotide within the target site. The positional difference in editing efficiency, such as is shown in FIGS. 15B, 15D, and 15E, was unexpected. For CD33 in FIG. 15A, the C-to-T variation is due to a natural variant not induced by editing. FIG. 15F is a bar graph showing there is minimal impact of multiplex editing on the capacity of human FLCD34+ cells to differentiate, using a colony forming analysis system. Cells were plated in a colony forming assay to evaluate the impact of editing on HSC multilineage differentiation. The graph shows the number of each type of differentiated cell (GEMM: granulocyte, erythroid macrophage, and megakaryocyte, GM: granulocyte-macrophage, G: granulocyte, M: macrophage, or BFU-E: burst-forming unit-erythrocyte) counted in colonies formed from plating edited 400 cells.

[0505] FIGS. 16A-16D is a series of graphs illustrating multiplex ABE8e HBG/CD33 editing in human mobilized peripheral blood (mPB) CD34+ cells. CD34+ cell culture. Human CD34+ cells were harvested and enriched from G-CSF mobilized peripheral blood (PB). For enrichment of CD34+ cells, red cells were lysed in ammonium chloride lysis buffer, and white blood cells were incubated for 20 min with the 12.8 immunoglobulin M anti-CD34 antibody and then washed and incubated for another 20 min with magnetic-activated cell-sorting anti-immunoglobulin M microbeads (Miltenyi Biotec). The cell suspension was run through magnetic columns enriching for CD34+ cell fractions with a purity of 60 to 80% confirmed by flow cytometry. Enriched CD34+ cells were cultured in stemspan serum-free expansion medium II (SFEM II) (STEMCELL Technologies) supplemented with penicillin and streptomycin (100 U/ml; Gibco by Life Technologies), stem cell factor (PeproTech), thrombopoietin (PeproTech), and Fms-related tyrosine kinase 3 ligand (Miltenyi Biotec) (100 ng/ml for each cytokine). Cells were edited with ABE8e mRNA and single guide RNA (sgRNA) targeting each of the CD33 and HBG-175 sites. Editing efficiency was measured by EditR at the CD33 or HBG-175 sites. Arrows show the position of edits; starred (★) boxes show editing frequencies.

[0506] FIGS. 17A-17E illustrate ABE8e CD33 editing in NHP CD34+ cells. Cells were edited with two different concentrations (high and low) of ABE8e mRNA and single guide RNA (sgRNA) targeting CD33. FIG. 17A is three panels showing editing efficiency measured by EditR. Arrows show the position of edits, and starred (★) boxes show editing frequencies. FIG. 17B is a bar graph showing percentage of CD33 expression in the same edited cells, measured by flow cytometry analysis. FIG. 17C is a bar graphs showing there is minimal impact of ABE8e editing using either high or low mRNA on the capacity of NHP CD34+ cells to differentiate, measured using a colony forming analysis system. Cells were plated in a colony forming assay to evaluate the impact of editing on HSC multilineage differentiation, as in FIG. 15B. FIG. 17D is a schematic drawing of mono- vs. bi-allelic CD33 editing. FIG. 17E is a pair of pie graphs showing the percentage of mono- vs. bi-allelic CD33 editing frequencies (in treated NHP CD34+ cells) measured in single colonies (n=49) at either targeted adenine.

[0507] FIGS. 18A-18B illustrate multiplex ABE8e HBG/CD33 editing in NHP CD34+ cells and analysis of single- vs. double-edits at a single cell level. FIG. 18A is an outline of the experimental procedure. FIG. 18B is a pie graph showing the frequency of single- vs. double-edits in derived colonies (n=46) from treated CD34+ cells. Over half of the colonies show editing at both targets.

[0508] FIGS. 19A-19C show ABE8e CD33 editing in NHP HSPC subsets. NHP CD34+ cells (bottom panel, FIG. 19A) were treated with ABE8e mRNA or RNPs targeting CD33 and subsequently sorted for the different HSPC subpopulations: CD34+ (FIG. 19A, top panel), CD90+, CD90- and CD45RA+(FIG. 19B). Validation of the purity of the sorting experiment is shown. CD33 editing efficiency in the different subpopulations from FIG. 19A-19B, measured by NGS, is shown in cells treated with ABE8e mRNA (FIG. 19C, top panel) or RNPs (FIG. 19C, bottom panel).

### Example 2: Efficient Engraftment of Base Edited Cells in Mice

[0509] While CD33 inactivation is a promising strategy for selection and/or selective protection of cells of therapeutic value, various embodiments require that the edited cells are capable of in vivo engraftment. The present disclosure includes the surprising observation that base edited cells display remarkably high in vivo engraftment as compared to CRISPR edited cells.

[0510] Engraftment of human CD34+ cells in the mouse xenotransplant model. For in vivo assessment of engineered HSPCs, NOD.Cg-PrkdcscidII2rgtm1Wjl/Szj (NOD SCID gamma/, NSG) neonate mice were infused with 5.0×10⁵ fetal liver human CD34+ cells or adult mice were infused with 1.0×10⁶ PB human CD34+ cells. Peripheral blood and tissue samples collected and processed as previously described (Godwin et al., Leukemia 34(9):2479-2483, 2020; PMID: 32071429). Flow cytometry staining was performed with human CD45-PerCP (Clone 2D1), mouse CD45.1/CD45.2-V500 (Clone 30-F11), CD3-FITC or -APC (Clone UCHT1), CD4-V450 (Clone RPA-T4), CD2O-PE (Clone 2H7), CD14-APC or -PE-Cy7 (Clone M5E2), CD34-APC (Clone 581) (all from BD Biosciences, San Jose, Calif.), and CD33-PE (Clone AC104.3E3, Miltenyi Biotec). Engraftment, multilineage differentiation and in vivo editing efficiency of treated HSPCs were tracked longitudinally in peripheral blood and tissues.

[0511] FIGS. 20A, 20B illustrate engraftment of multiplex edited ABE8e HBG/CD33 FL human CD34+ cells in immunodeficient mice. Cells edited for both HBG and CD33 using ADE8e (as described for FIG. 19) were administered to immunodeficient mice, and the ability of the multiplex edited cells to home to bone marrow and differentiate was examined. FIG. 20A is a pair of graphs showing longitudinal tracking of human cell engraftment based on human CD45+ flow cytometry staining from peripheral blood over 21 weeks (left) or from spleen and bone marrow of transplanted mice at the time of necropsy (right). FIG. 20B is a pair of graphs showing persistence of CD33 knockdown after engraftment. Longitudinal tracking of CD33 expression from peripheral blood over 21 weeks (left) or from spleen and bone marrow of transplanted mice at the time of necropsy (right); untreated cells are solid squares, and multiplex edited cells are solid circles.

[0512] The total length of base editor genes plus regulatory elements exceeds 8 kb and the payload capacity of lentiviral or adeno-associated virus vectors. HDAd5/35++ vectors that can package genomes of ˜32 kb can address this problem. In a first version, the BE enzyme (rAPOBEC1-nCas9-2×UGI for CBE; 2xTadA-nCas9 for ABE) driven by an EF1a promoter and the sgRNA driven by a human U6 promoter were cloned into the HDAd plasmid pHCA. An mgmt/GFP cassette flanked by frt and transposon sites was also cloned into the vector to mediate selection of transduced cells by O⁶BG/BCNU (FIG. 31). Notably, the BE components were placed outside the SB100× transposon, only allowing for their transient expression while, at the same time, maintaining integrated expression of the mgmt/GFP cassette upon co-delivery with an HDAd-SB vector expressing SB100× transposase/flippase (Wang et al., Mol Ther Methods Clin Dev. 1:14057, 2015). Although the yield per 2-liter spinner culture was relatively low (1×10¹² viral particles or vp on average), it was possible to rescue all four CBE vectors. This is in contrast to HDAd-CRISPR vectors that are not rescuable without mechanisms that regulate nuclease expression (Li et al., Cancer Res. 80(3):549-560, 2020). The results suggested that DSB-free BE systems may be less toxic to the HDAd producer cells (116 cells) than CRISPR/Cas9. For the ABE vectors, the virus genome appeared rearranged and no distinct HDAd band was observed after ultracentrifugation in CsCl gradients. Since the major difference between ABE and CBE vectors is the deaminase domain, it was likely that the two 594 bp TadA-32aa repeats in ABE vectors were the elements causing recombination and rearrangements within the HDAd genome. To address this problem, the following modifications to the original version of the ABE vectors were made: i) the sequence repetitiveness between the two TadA-32aa repeats was reduced by alternative codon usage; ii) A PGK promoter was used to drive the BE enzyme expression. While being highly active in HSPCs33, the PGK promoter exhibits lower activity in 116 producer cells than EF1a34, thereby reducing potential TadA-associated adverse effects; and iii) a miR183/218-based gene regulation system was utilized to further suppress BE expression in 116 cells while allowing it in HSPCs32 (FIG. 31). This second version of ABE constructs with this optimized design led to successful rescue of two HDAd-ABE viruses with an average yield of 3.3×10¹² vp/spinner, which is within the normal yield range.

[0513] A potential problem with DSB-depending gene editing strategies is large genomic deletions/rearrangements (Kosicki et al., Nat Biotechnol. 36(8):765-771, 2018). This side effect become more pronounced in targeting the HBG1/2 promoters. Due to the two identical targets in the HBG1 and HBG2 regions, we and others have reported that CRISPR/Cas9 editing led to the 4.9 kb intergenic deletion (Traxler et al., Nat Med 22(9):987-990, 2016; Li et al., Blood 131(26):2915-2928, 2018). As a result, the whole HBG2 gene was removed. Therefore, we interrogated this genomic deletion by a semi-quantitative PCR described previously (Li et al., Blood 131(26):2915-2928, 2018). It is noteworthy that, by establishing a standard curve, this detection approach can adequately measure the percentage of deletion without overestimation (resulting from preferential PCR amplification of the shorter 5.0 kb band). For comparison, mouse samples treated side-by-side with a CRISPR/Cas9 vector (HDAd-HBG-CRISPR) targeting the HBG1/2 promoters (Li et al., Blood 131(26):2915-2928, 2018) were included. The average 4.9 kb deletion in the HDAd-BE-sgHBG #2-treated mice was 0.8% (FIG. 32). In some mice, it was barely detectable. This was, on average, ten-fold lower than that in HDAd-HBG-CRISPR treated samples. See also Example 10 in related application No. PCT/US2020/040756, which is incorporated herein by reference.

[0514] Engraftment and survival of edited HSCs in vivo is unexpectedly superior for HSCs in which a target editing site is modified by base editing (in this experiment, the AncBE4max system; Koblan et al., Nat Biotechnol. 36(9):843-846, 2018) as compared to HSCs in which a target editing site is inactivated by CRISPR where both were delivered via viral expression vector. Engraftment studies were conducted by transplanting CD34+ cells transduced with Ad5/35++ adenoviral vector encoding an ABE system (including a guide RNA referred to as HBG #2 and having the sequence CTTGACCAATAGCCTTGACA (SEQ ID NO: 10) for a target site edit of TGACCA, -113 A>G) or a CRISPR editing system including an HBG-specific sgRNA into sublethally irradiated NOD-scid IL2rγnull (NSG) mice carrying a 248 kb of the human β-globin locus (β-YAC mice) including the HBG #2 target editing site. See FIG. 31. Controls included untransduced mice, and mice transduced with a helper dependent Ad5/35++ empty vector control.

[0515] Results showed that unexpectedly HDAd-BE-sgHBG #2 transduction led to similar level of engraftment (measured by huCD45 expression) as the HDAd-GFP treatment (FIG. 21), whereas HDAd-HBG-CRISPR transduction largely deprived CD34+ cells of their engraftment capability, in line with previous findings (Li et al., Mol Ther Methods Clin Dev. 9:390-401, 2018). Importantly, the editing level was maintained in engrafted cells harvested at week 8 after transplantation. These data suggest no evident cytotoxicity from HDAd-ABE-sgHBG #2 transduction in human HSPCs. See also Example 11 in related application No. PCT/US2020/040756, which is incorporated herein by reference.

[0516] The present disclosure provides that the unexpected differential in HSC survival or proliferation in vivo demonstrated in FIG. 21 is the result of differential genotoxicity and cytotoxicity in HSCs. A major concern with current genome-editing technologies using CRISPR/Cas9 is that they introduce double-stranded DNA breaks (DSBs), which may be detrimental to host cells by causing unwanted large fragment deletion and p53-dependent DNA damage responses. Base editors are capable of installing precise nucleotide mutations at targeted genomic loci and present the advantage of avoiding DSBs. This study shows that a functional feature of HSCs that is critical to various embodiments, namely the survival and/or proliferation (e.g., engraftment) in sub-lethally irradiated NSG mice, is not affected by a BE but is dramatically reduced after transduction of human CD34+ cells with CRISPR/Cas9 expressing vector. While the general phenomenon of CRISPR editing system genotoxicity and cytotoxicity were known, and it was further known that base editing systems are characterized by reduced genotoxicity and cytotoxicity, the present disclosure demonstrates the unexpectedly great impact of this difference on survival and/or proliferation of HSCs. This unexpected differential disclosed herein is in one or more respects particular to HSCs and/or survival and/or proliferation of HSCs in vivo.

[0517] The difference in engraftment between CRISPR- and BE-modified HSCs is more pronounced after delivery using an expression vector (such as Ad5/35++ delivery exemplified here) as compared to delivery via RNP or mRNA electroporation likely because of the longer time period during which the editor is being expressed in the HSCs (a week or more with expression vector-based delivery, compared to 2-3 days with RNP or mRNA electroporation). The longer exposure to an expressed editing system increases chances for off-target effect and toxicity, which is more severe with CRISPR.

[0518] Discussion

[0519] In this Example, the editing efficiency and toxicity of delivery by ABE8e mRNA versus delivery by ABE8e purified protein in CD34+ HSPCs (human and NHPs) were compared and substantially better results were found with mRNA delivery.

### Example 3: In Vivo Selection of CD33-Inactivated Hematopoietic Stem Cells after CD33 Base Editing in Mice Treated with an Anti-CD33 Agent

[0520] The present Example further confirms efficient and effective inactivation of CD33 by base editing and efficient and effective survival and/or proliferation of cells in vivo (e.g., during engraftment following transplantation into a recipient). Data of the present Example further demonstrate selection of CD33-inactivated cells in vivo by administration of an anti-CD33 agent.

[0521] In the present Example, CD33 was inactivated by a cytidine base editor (CBE) system that converts C nucleotides to T nucleotides. Embodiments of this process are exemplified in FIGS. 3A-3B. Particular CD33 modifications inactivating intron1 splicing donor site and/or introducing a stop codon into exon 2 are also provided, together with the utilized gRNA sequences (FIG. 3B). These gRNA sequences (SEQ ID NOs: 4 and 5) were used to modify HSCs in vitro by CBE mRNA introduced through electroporation (FIG. 4A). As shown in FIG. 3B, E1 gRNA inactivates intron 1 splicing donor site and E2 gRNA introduces a stop codon in exon 2. Experiments were carried out using methods described in Example 1.

[0522] CD33 surface expression measured by flow cytometry with a labeled anti-CD33 antibody and next generation sequencing (NGS) were used to determine the efficiency of CD33 inactivation by gene editing in HSCs (FIGS. 4A and 4B). Flow cytometry results shown in FIG. 4B confirm inactivation of CD33 expression by a base editing system including the E1 or E2 gRNA (FIG. 3B) relative to Cas9 only reference at all measured time points. CD33 inactivation was also shown to be achieved by a CRISPR/Cas9 system engineered for CD33 inactivation by an E2 deletion. Inactivation of the intron 1 splicing donor site by base editing caused a greater decrease in percent CD33 expression detected by flow cytometry than introduction of a stop codon in exon 2 by base editing.

[0523] Percentage CD33 E2 deletion (FIG. 5A), CBE1 editing (FIG. 5B), and CBE2 editing (FIG. 5C) were measured in treated human fetal liver (FL) CD34+ cells, as compared to a Cas9 only control. CBE1 gRNA for inaction of the intron 1 splicing donor site caused a greater frequency of base editing than the CBE2 gRNA for introduction of a stop codon in exon 2.

[0524] Engineered HSCs of the present Example were further transplanted by injection into mice and engraftment was monitored for 18 weeks (FIGS. 6 and 7). Measurements of total engraftment shown in FIG. 7 demonstrate that CBE-edited CD33-inactivated HSCs display normal engraftment and differentiation. As measured over up to 18 weeks, decreased CD33 expression and/or frequency of CD33 nucleic acid sequence inactivation in CBE-edited CD33-inactivated HSCs persisted across the measured time points (FIGS. 8A-8B).

[0525] FIGS. 9A-9B illustrate correlation between in vivo CD33 editing levels and protection from GO-induced cytotoxicity. Three mice per group were treated with GO (FIG. 9A), and a sharp decrease in the number of CD14+ monocytes was observed 1 week post treatment, showing that the drug is active. The magnitude of the decrease was inversely correlated with editing efficiency. The sharper decrease was seen in the control group and a smaller effect was observed in the CRISPR group where editing efficiency was highest. FIG. 9B shows the parallel control experiment, without GO treatment. FIGS. 10A-10B further illustrate recovery of CD33 expression in HSCs following administration of GO. No effect of GO on CD33 negative cell lineages was observed (FIGS. 11A-11B). The recovery in CD14+ cell number over time suggests that progenitor or stem cells are able to replenish the pool of monocytes and were thus not affected by treatment. Data demonstrate that, as compared to base edited HSCs, CRISPR edited HSCs are not well suited to survival in vivo (FIG. 9B).

[0526] Discussion

[0527] Two approaches were pursued to inactivate CD33. In the first approach, a premature stop codon was introduced with CBE into CD33 exon 2 that is predicted to either produce a premature and non-functional protein, or no protein at all if the messenger RNA is degraded by the non-sense mediated decay pathway (Hug et al., Nucleic Acids Res. 44(4): 1483-1495, 2016). In the second approach, conserved splicing donor or acceptor site were targeted to dysregulate CD33 splicing process and inactivate expression. Using CBE, it was demonstrated in this example that the second approach (targeting a splicing site) was more efficient at inactivating CD33; subsequent experiments using ABE were conducted with this approach.

### Example 4: Characterization of Base Editor Modified Cells in Non-Human Primates

[0528] This example provides an exemplary method for autologous transplantation of BE edited cells into non-human primates, and methods for analysis of the resultant biological activity.

[0529] Autologous NHP transplantation, priming (mobilization), collection of cells, and genetic engineering are conducted consistent with previously published protocols (Trobridge et al., Blood 111(12):5537-5543, 2008; PMID: 18388180). In parallel to cell processing, macaques are conditioned with myeloablative TBI of 1020 cGy from a 6-MV x-ray beam of a single-source linear accelerator located at the Fred Hutch South Lake Union Facility (Seattle, Wash., USA); irradiation is administered as a fractionated dose over the 2 days before cell infusion. During irradiation, animals are housed in a specially modified cage that provides unrestricted access for the irradiation while simultaneously minimizing excess movement. The dose is administered at a rate of 7 cGy/min delivered as a midline tissue dose. Granulocyte colony-stimulating factor is administered daily from the day of cell infusion until the animals began to show onset of neutrophil recovery. Supportive care, including antibiotics, electrolytes, fluids, and transfusions, is given as necessary, and blood counts are analyzed daily to monitor hematopoietic recovery.

[0530] NHP-primed BM is harvested, enriched, and cultured as previously described (Trobridge et al., Blood 111(12):5537-5543, 2008; PMID: 18388180). Briefly, before enrichment of CD34+ cells, red cells are lysed in ammonium chloride lysis buffer, and white blood cells are incubated for 20 min with the 12.8 immuno- globulin M anti-CD34 antibody and then washed and incubated for another 20 min with magnetic-activated cell-sorting anti-immunoglobulin M microbeads (Miltenyi Biotec). The cell suspension is run through magnetic columns enriching for CD34+ cell fractions with a purity of 60 to

80% confirmed by flow cytometry. Human CD34+ cells are harvested and enriched from mobilized PB as previously described (Adair et al., Nat. Commun. 7:13173, 2016, DOI: 10.1083/ncomms13173). Enriched CD34+ cells are cultured in stemspan serum-free expansion medium II (SFEM II) (STEMCELL Technologies) supplemented with penicillin and streptomycin (100 U/ml; Gibco by Life Technologies), stem cell factor (PeproTech), thrombopoietin (PeproTech), and Fms-related tyrosine kinase 3 ligand (Miltenyi Biotec) (100 ng/ml for each cytokine).

[0531] The art recognizes methods for evaluating biological function(s) of modified cells in non-human primates, based for instance on the modifications included in the introduced cells. See, for instance, methods described in Humber et al. (Leukemia 33:762-808, 2019) for evaluating CD33 modifications; and Humbert et al. (Mol. Ther. Meth. & Clin. Dev. 8:75-86, 2018) for evaluating hematopoietic stem cell gene editing for β-hemoglobinopathies.

### Example 5: In Vivo CD33-Inactivation for Selection of Therapeutically Engineered HSCs

[0532] This Example illustrates in vivo genetic engineering of HSCs, where inactivation of CD33 provides a means for selection of engineered HSCs by administration of an anti-CD33 agent. In the present Example, genetic engineering of HSCs in vivo is achieved using a viral vector, e.g., a helper-dependent adenoviral vector such as a helper dependent Ad35 viral vector.

[0533] In a first therapy component, a subject can receive an immunosuppressive conditioning regimen to reduce or control the immune reaction to administration of the viral vector. As one example of a conditioning regimen, a subject can be administered tacrolimus, dexamethasone, anakinra, and/or tocilizumab. For example, in one particular regimen, a subject is administered (i) tacrolimus for 4 days prior to vector administration, on each day of vector administration, and for two days after the last day of vector administration; (ii) dexamethasone for one day prior to vector administration, and on each day of vector administration; (iii) anakinra on each day of vector administration; and (iv) tocilizumab on each day of vector administration.

[0534] In a second therapy component, HSCs of a human subject are mobilized by administration to the subject of a mobilization regimen. As one example of HSC mobilization, a subject can be administered G-CSF and AMD3100 prior to administration of a viral vector. A particular mobilization regimen can include (i) administration of G-CSF on each of 4 days prior to vector administration and on the first day of vector administration; and (ii) administration of AMD3100 one day prior to vector administration and on the first day of vector administration. Other mobilizing agents are known in the art and disclosed herein. For example, a mobilizing agent can be or include a Gro-Beta agent, e.g., as disclosed in WO 2019/089833 (e.g., Gro-Beta, Gro-BetaT, and a variant thereof), WO 2019/113375, and/or WO 2019/136159, each of which is incorporated herein by reference in its entirety and in particular with respect to sequences relating to Gro-Beta and modified forms thereof. One exemplary Gro-Beta agent is MGTA 145 (Magenta Therapeutics). Certain Gro-Beta agents do not include amino acids corresponding to the four N-terminal amino acids of canonical Gro-Beta. In a third therapy component, the subject can be administered a viral vector, e.g., a viral vector that selectively transduces HSCs (e.g., a helper-dependent adenoviral vector that selectively transduces HSCs such as a helper dependent Ad35 viral vector), by injection in a single dose or in two doses administered on consecutive days A viral vector can encode a base editing system that includes an ABE or CBE and an sgRNA for inactivation of CD33. A viral vector can further encode a therapeutic payload for integration of a therapeutic transgene into the genome of a target cell and/or one or more additional sgRNAs, e.g., for treatment of a condition unrelated to CD33. For example, the condition unrelated to CD33 could be a hemoglobinopathy and the therapeutic payload and/or additional sgRNA(s) could include a transgene or sgRNA engineered cause an increase in gamma globin expression. Related application No. PCT/US2020/040756 is incorporated herein by reference in its entirety and with respect to adenoviral vectors, in particular with respect to Ad35 vectors, including HDAd35 vectors and related vectors.

[0535] In a fourth therapy component, subsequent to administration of a final dose of viral vector, a subject can be administered an anti-CD33 agent that eliminates cells (e.g., eliminates HSCs) in which CD33 is not inactivated. In various examples, an anti-CD33 agent can be administered at one or more times selected from any of one or more days on which vector is administered or a date that is at least one day after the day on which the final dose of vector is administered, e.g., 1 day, 2 days, 3 days, 4 days, 5 days, 6 days, 1 week, 2 weeks, 3 weeks, 4 weeks, 5 weeks, 6 weeks, 7 weeks, 8 weeks, 9 weeks, 10 weeks, 11 weeks, 12 weeks, 13 weeks, 14 weeks, 15 weeks, 16 weeks, 17 weeks, 18 weeks, 19 weeks, 20 weeks, 6 months, 9 months, or 1 year after the day on which the final dose of vector is administered. Administration of an anti-CD33 agent will selectively increase the frequency of engineered HSCs relative to other HSCs as compared to a reference to which the anti-CD33 agent is not administered. As those of skill in the art will appreciate, increasing and/or maintaining the population of therapeutically engineered cells in the subject's HSC population by selection for CD33-inactivated HSCs will increase therapeutic efficacy.

### Closing Paragraphs.

[0536] As will be understood by one of ordinary skill in the art, each embodiment disclosed herein can comprise, consist essentially of or consist of its particular stated element, step, ingredient or component. Thus, the terms “include” or “including” should be interpreted to recite: “comprise, consist of, or consist essentially of.” The transition term “comprise” or “comprises” means includes, but is not limited to, and allows for the inclusion of unspecified elements, steps, ingredients, or components, even in major amounts. The transitional phrase “consisting of” excludes any element, step, ingredient or component not specified. The transition phrase “consisting essentially of” limits the scope of the embodiment to the specified elements, steps, ingredients or components and to those that do not materially affect the embodiment. A material effect would cause a statistically-significant reduction in resistance to a CD33 targeting therapy in cells genetically modified with a base editing system to reduce CD33 as disclosed herein.

[0537] Unless otherwise indicated, all numbers expressing quantities of ingredients, properties such as molecular weight, reaction conditions, and so forth used in the specification and claims are to be understood as being modified in all instances by the term “about.” Accordingly, unless indicated to the contrary, the numerical parameters set forth in the specification and attached claims are approximations that may vary depending upon the desired properties sought to be obtained by the present invention. At the very least, and not as an attempt to limit the application of the doctrine of equivalents to the scope of the claims, each numerical parameter should at least be construed in light of the number of reported significant digits and by applying ordinary rounding techniques. When further clarity is required, the term “about” has the meaning reasonably ascribed to it by a person skilled in the art when used in conjunction with a stated numerical value or range, i.e. denoting somewhat more or somewhat less than the stated value or range, to within a range of ±20% of the stated value; ±19% of the stated value; ±18% of the stated value; ±17% of the stated value; ±16% of the stated value; ±15% of the stated value; ±14% of the stated value; ±13% of the stated value; ±12% of the stated value; ±11% of the stated value; ±10% of the stated value; ±9% of the stated value; ±8% of the stated value; ±7% of the stated value; ±6% of the stated value; ±5% of the stated value; ±4% of the stated value; ±3% of the stated value; ±2% of the stated value; or ±1% of the stated value.

[0538] Notwithstanding that the numerical ranges and parameters setting forth the broad scope of the invention are approximations, the numerical values set forth in the specific examples are reported as precisely as possible. Any numerical value, however, inherently contains certain errors necessarily resulting from the standard deviation found in their respective testing measurements.

[0539] Recitation of ranges of values herein is merely intended to serve as a shorthand method of referring individually to each separate value falling within the range. Unless otherwise indicated herein, each individual value is incorporated into the specification as if it were individually recited herein. All methods described herein can be performed in any suitable order unless otherwise indicated herein or otherwise clearly contradicted by context. The use of any and all examples, or exemplary language (e.g., “such as”) provided herein is intended merely to better illuminate the invention and does not pose a limitation on the scope of the invention otherwise claimed. No language in the specification should be construed as indicating any non-claimed element essential to the practice of the invention.

[0540] Groupings of alternative elements or embodiments of the invention disclosed herein are not to be construed as limitations. Each group member may be referred to and claimed individually or in any combination with other members of the group or other elements found herein. It is anticipated that one or more members of a group may be included in, or deleted from, a group for reasons of convenience and/or patentability. When any such inclusion or deletion occurs, the specification is deemed to contain the group as modified thus fulfilling the written description of all Markush groups used in the appended claims.

[0541] Certain embodiments of this invention are described herein, including the best mode known to the inventors for carrying out the invention. Of course, variations on these described embodiments will become apparent to those of ordinary skill in the art upon reading the foregoing description. The inventor expects skilled artisans to employ such variations as appropriate, and the inventors intend for the invention to be practiced otherwise than specifically described herein. Accordingly, this invention includes all modifications and equivalents of the subject matter recited in the claims appended hereto as permitted by applicable law. Moreover, any combination of the above-described elements in all possible variations thereof is encompassed by the invention unless otherwise indicated herein or otherwise clearly contradicted by context.

[0542] Furthermore, numerous references have been made to patents, printed publications, journal articles and other written text throughout this specification (referenced materials herein). Each of the referenced materials are individually incorporated herein by reference in their entirety for their referenced teaching(s). In addition to the foregoing, base-editing systems described in the following publications are also expressly incorporated by reference herein: Gerkhe et al., Nat. Biotechnol., 10.1038/nbt.4199 (2018); Hu et al., Nature, 556, 57-63 (2018); Jiang et al., Cell. Res, 10.1038/s41422-018-0052-4 (2018); Kim et al., Nat. Biotechnol. 35, 475-480 (2017); Koblan et al., Nat. Biotechnol 36(9):843-846 (2018); Komer et al., Nature, 533, 420-424, (2016); Komer et al., Sci. Adv., 3, eaao4774, (2017); Li et al., Nat. Biotechnol. 36, 324-327 (2018); Nishida et al., Science, 353(6305), 10.1126/science.aaf8729 (2016); Nishimasu et al., Science; 361(6408): 1259-1262 (2018); Rees et al., Nat. Commun. 8, 15790, (2017); Rees & Liu Nat. Rev Genet. 19(12): 770-788 (2018); and Wang et al., Nat. Biotechnol. 10.1038/nbt.4198 (2018).

[0543] In closing, it is to be understood that the embodiments of the invention disclosed herein are illustrative of the principles of the present invention. Other modifications that may be employed are within the scope of the invention. Thus, by way of example, but not of limitation, alternative configurations of the present invention may be utilized in accordance with the teachings herein. Accordingly, the present invention is not limited to that precisely as shown and described.

[0544] The particulars shown herein are by way of example and for purposes of illustrative discussion of the preferred embodiments of the present invention only and are presented in the cause of providing what is believed to be the most useful and readily understood description of the principles and conceptual aspects of various embodiments of the invention. In this regard, no attempt is made to show structural details of the invention in more detail than is necessary for the fundamental understanding of the invention, the description taken with the drawings and/or examples making apparent to those skilled in the art how the several forms of the invention may be embodied in practice.

[0545] Definitions and explanations used in the present disclosure are meant and intended to be controlling in any future construction unless clearly and unambiguously modified in the following examples or when application of the meaning renders any construction meaningless or essentially meaningless. In cases where the construction of the term would render it meaningless or essentially meaningless, the definition should be taken from Webster's Dictionary, 3rd Edition or a dictionary known to those of ordinary skill in the art, such as the Oxford Dictionary of Biochemistry and Molecular Biology (Ed. Anthony Smith, Oxford University Press, Oxford, 2004).

### REFERENCE TO SEQUENCE LISTING

[0546] The nucleic acid and/or amino acid sequences described herein are shown using standard letter abbreviations, as defined in 37 C.F.R. § 1.822. Only one strand of each nucleic acid sequence is shown, but the complementary strand is understood as included in embodiments where it would be appropriate. A computer readable text file, entitled “20N4892.txt (Sequence Listing.txt)” created on or about Apr. 21, 2022, with a file size of 836 KB, contains the sequence listing for this application and is hereby incorporated by reference in its entirety.

[0547] The following sequences are included in this application:

MfCD33_G7PYH0
MPLLLLPLLWAGALAMDPRVRLEVQESVTVOEGLCVLVPCTFFHPVPYHTRNSPVHGYWFREGAIVSLDSPVAT
NKLDQEVQEETQGRFRLLGDPSRNNCSLSIVDARRRDNGSYFFRMEKGSTKYSYKSTQLSVHVTDLTHRPQILI
PGALDPDHSKNLTCSVPWACEQGTPPIFSWMSAAPTSLGLRTTHSSVLIITPRPQDHGTNLTCQVKFPGAGVTT
ERTIQLNVSYASQNPRTDIFLGDGSGRKARKQGVVQGAIGGAGVTVLLALCLCLIFFTVQ (SEQ ID NO:
1)
HsCD33_P20138
MPLLLLLPLLWAGALAMDPNFWLQVQESVTVQEGLCVLVPCTFFHPIPYYDKNSPVHGYWFREGAIISRDSPVA
TNKLDQEVQEETQGRFRLLGDPSRNNCSLSIVDARRRDNGSYFFRMERGSTKYSYKSPQLSVHVTDLTHRPKIL
IPGTLEPGHSKNLTCSVSWACEQGTPPIFSWLSAAPTSLGPRTTHSSVLIITPRPQDHGTNLTCQVKFAGAGVT
TERTIQLNVTYVPQNPTTGIFPGDGSGKQETRAGVVHGAIGGAGVTALLALCLCLIFFIVQ (SEQ ID NO:
2)
MmCD33_Q63994
MLWPLPLFLLCAGSLAQDLEFQLVAPESVTVEEGLCVHVPCSVFYPSIKLTLGPVTGSWLRKGVSLHEDSPVAT
SDPRQLVQKATQGRFQLLGDPQKHDCSLFIRDAQKNDTGMYFFRVVREPFVRYSYKKSQLSLHVTSLSRTPDII
IPGTLEAGYPSNLTCSVPWACEQGTPPTFSWMSTALTSLSSRTTDSSVLTFTPQPQDHGTKLTCLVTFSGAGVT
VERTIQLNVTRKSGQMRELVLVAVGEATVKLLILGLCLVFLIVME (SEQ ID NO: 3)
Inactivate intron 1 splicing donor site:
CCCCTGCTGTGGGCAGGTGAGTG (SEQ ID NO: 4)
Introduce stop codon in exon2:
CCCCAGTTCATGGTTACTGGTTC (SEQ ID NO: 5)
ABE8e (Addgene #138489)
ATATGCCAAGTACGCCCCCTATTGACGTCAATGACGGTAAATGGCCCGCCTGGCATTATGCCCAGTACATGACC
TTATGGGACTTTCCTACTTGGCAGTACATCTACGTATTAGTCATCGCTATTACCATGGTGATGCGGTTTTGGCA
GTACATCAATGGGCGTGGATAGCGGTTTGACTCACGGGGATTTCCAAGTCTCCACCCCATTGACGTCAATGGGA
GTTTGTTTTGGCACCAAAATCAACGGGACTTTCCAAAATGTCGTAACAACTCCGCCCCATTGACGCAAATGGGC
GGTAGGCGTGTACGGTGGGAGGTCTATATAAGCAGAGCTGGTTTAGTGAACCGTCAGATCCGCTAGAGATCCGC
GGCCGCTAATACGACTCACTATAGGGAGAGCCGCCACCATGAAACGGACAGCCGACGGAAGCGAGTTCGAGTCA
CCAAAGAAGAAGCGGAAAGTCTCTGAGGTGGAGTTTTCCCACGAGTACTGGATGAGACATGCCCTGACCCTGGC
CAAGAGGGCACGGGATGAGAGGGAGGTGCCTGTGGGAGCCGTGCTGGTGCTGAACAATAGAGTGATCGGCGAGG
GCTGGAACAGAGCCATCGGCCTGCACGACCCAACAGCCCATGCCGAAATTATGGCCCTGAGACAGGGCGGCCTG
GTCATGCAGAACTACAGACTGATTGACGCCACCCTGTACGTGACATTCGAGCCTTGCGTGATGTGCGCCGGCGC
CATGATCCACTCTAGGATCGGCCGCGTGGTGTTTGGCGTGAGGAACTCAAAAAGAGGCGCCGCAGGCTCCCTGA
TGAACGTGCTGAACTACCCCGGCATGAATCACCGCGTCGAAATTACCGAGGGAATCCTGGCAGATGAATGTGCC
GCCCTGCTGTGCGATTTCTATCGGATGCCTAGACAGGTGTTCAATGCTCAGAAGAAGGCCCAGAGCTCCATCAA
CTCCGGAGGATCTAGCGGAGGCTCCTCTGGCTCTGAGACACCTGGCACAAGCGAGAGCGCAACACCTGAAAGCA
GCGGGGGCAGCAGCGGGGGGTCAGACAAGAAGTACAGCATCGGCCTGGCCATCGGCACCAACTCTGTGGGCTGG
GCCGTGATCACCGACGAGTACAAGGTGCCCAGCAAGAAATTCAAGGTGCTGGGCAACACCGACCGGCACAGCAT
CAAGAAGAACCTGATCGGAGCCCTGCTGTTCGACAGCGGCGAAACAGCCGAGGCCACCCGGCTGAAGAGAACCG
CCAGAAGAAGATACACCAGACGGAAGAACCGGATCTGCTATCTGCAAGAGATCTTCAGCAACGAGATGGCCAAG
GTGGACGACAGCTTCTTCCACAGACTGGAAGAGTCCTTCCTGGTGGAAGAGGATAAGAAGCACGAGCGGCACCC
CATCTTCGGCAACATCGTGGACGAGGTGGCCTACCACGAGAAGTACCCCACCATCTACCACCTGAGAAAGAAAC
TGGTGGACAGCACCGACAAGGCCGACCTGCGGCTGATCTATCTGGCCCTGGCCCACATGATCAAGTTCCGGGGC
CACTTCCTGATCGAGGGCGACCTGAACCCCGACAACAGCGACGTGGACAAGCTGTTCATCCAGCTGGTGCAGAC
CTACAACCAGCTGTTCGAGGAAAACCCCATCAACGCCAGCGGCGTGGACGCCAAGGCCATCCTGTCTGCCAGAC
TGAGCAAGAGCAGACGGCTGGAAAATCTGATCGCCCAGCTGCCCGGCGAGAAGAAGAATGGCCTGTTCGGAAAC
CTGATTGCCCTGAGCCTGGGCCTGACCCCCAACTTCAAGAGCAACTTCGACCTGGCCGAGGATGCCAAACTGCA
GCTGAGCAAGGACACCTACGACGACGACCTGGACAACCTGCTGGCCCAGATCGGCGACCAGTACGCCGACCTGT
TTCTGGCCGCCAAGAACCTGTCCGACGCCATCCTGCTGAGCGACATCCTGAGAGTGAACACCGAGATCACCAAG
GCCCCCCTGAGCGCCTCTATGATCAAGAGATACGACGAGCACCACCAGGACCTGACCCTGCTGAAAGCTCTCGT
GCGGCAGCAGCTGCCTGAGAAGTACAAAGAGATTTTCTTCGACCAGAGCAAGAACGGCTACGCCGGCTACATTG
ACGGCGGAGCCAGCCAGGAAGAGTTCTACAAGTTCATCAAGCCCATCCTGGAAAAGATGGACGGCACCGAGGAA
CTGCTCGTGAAGCTGAACAGAGAGGACCTGCTGCGGAAGCAGCGGACCTTCGACAACGGCAGCATCCCCCACCA
GATCCACCTGGGAGAGCTGCACGCCATTCTGCGGCGGCAGGAAGATTTTTACCCATTCCTGAAGGACAACCGGG
AAAAGATCGAGAAGATCCTGACCTTCCGCATCCCCTACTACGTGGGCCCTCTGGCCAGGGGAAACAGCAGATTC
GCCTGGATGACCAGAAAGAGCGAGGAAACCATCACCCCCTGGAACTTCGAGGAAGTGGTGGACAAGGGCGCTTC
CGCCCAGAGCTTCATCGAGCGGATGACCAACTTCGATAAGAACCTGCCCAACGAGAAGGTGCTGCCCAAGCACA
GCCTGCTGTACGAGTACTTCACCGTGTATAACGAGCTGACCAAAGTGAAATACGTGACCGAGGGAATGAGAAAG
CCCGCCTTCCTGAGCGGCGAGCAGAAAAAGGCCATCGTGGACCTGCTGTTCAAGACCAACCGGAAAGTGACCGT
GAAGCAGCTGAAAGAGGACTACTTCAAGAAAATCGAGTGCTTCGACTCCGTGGAAATCTCCGGCGTGGAAGATC
GGTTCAACGCCTCCCTGGGCACATACCACGATCTGCTGAAAATTATCAAGGACAAGGACTTCCTGGACAATGAG
GAAAACGAGGACATTCTGGAAGATATCGTGCTGACCCTGACACTGTTTGAGGACAGAGAGATGATCGAGGAACG
GCTGAAAACCTATGCCCACCTGTTCGACGACAAAGTGATGAAGCAGCTGAAGCGGCGGAGATACACCGGCTGGG
GCAGGCTGAGCCGGAAGCTGATCAACGGCATCCGGGACAAGCAGTCCGGCAAGACAATCCTGGATTTCCTGAAG
TCCGACGGCTTCGCCAACAGAAACTTCATGCAGCTGATCCACGACGACAGCCTGACCTTTAAAGAGGACATCCA
GAAAGCCCAGGTGTCCGGCCAGGGCGATAGCCTGCACGAGCACATTGCCAATCTGGCCGGCAGCCCCGCCATTA
AGAAGGGCATCCTGCAGACAGTGAAGGTGGTGGACGAGCTCGTGAAAGTGATGGGCCGGCACAAGCCCGAGAAC
ATCGTGATCGAAATGGCCAGAGAGAACCAGACCACCCAGAAGGGACAGAAGAACAGCCGCGAGAGAATGAAGCG
GATCGAAGAGGGCATCAAAGAGCTGGGCAGCCAGATCCTGAAAGAACACCCCGTGGAAAACACCCAGCTGCAGA
ACGAGAAGCTGTACCTGTACTACCTGCAGAATGGGCGGGATATGTACGTGGACCAGGAACTGGACATCAACCGG
CTGTCCGACTACGATGTGGACCATATCGTGCCTCAGAGCTTTCTGAAGGACGACTCCATCGACAACAAGGTGCT
GACCAGAAGCGACAAGAACCGGGGCAAGAGCGACAACGTGCCCTCCGAAGAGGTCGTGAAGAAGATGAAGAACT
ACTGGCGGCAGCTGCTGAACGCCAAGCTGATTACCCAGAGAAAGTTCGACAATCTGACCAAGGCCGAGAGAGGC
GGCCTGAGCGAACTGGATAAGGCCGGCTTCATCAAGAGACAGCTGGTGGAAACCCGGCAGATCACAAAGCACGT
GGCACAGATCCTGGACTCCCGGATGAACACTAAGTACGACGAGAATGACAAGCTGATCCGGGAAGTGAAAGTGA
TCACCCTGAAGTCCAAGCTGGTGTCCGATTTCCGGAAGGATTTCCAGTTTTACAAAGTGCGCGAGATCAACAAC
TACCACCACGCCCACGACGCCTACCTGAACGCCGTCGTGGGAACCGCCCTGATCAAAAAGTACCCTAAGCTGGA
AAGCGAGTTCGTGTACGGCGACTACAAGGTGTACGACGTGCGGAAGATGATCGCCAAGAGCGAGCAGGAAATCG
GCAAGGCTACCGCCAAGTACTTCTTCTACAGCAACATCATGAACTTTTTCAAGACCGAGATTACCCTGGCCAAC
GGCGAGATCCGGAAGCGGCCTCTGATCGAGACAAACGGCGAAACCGGGGAGATCGTGTGGGATAAGGGCCGGGA
TTTTGCCACCGTGCGGAAAGTGCTGAGCATGCCCCAAGTGAATATCGTGAAAAAGACCGAGGTGCAGACAGGCG
GCTTCAGCAAAGAGTCTATCCTGCCCAAGAGGAACAGCGATAAGCTGATCGCCAGAAAGAAGGACTGGGACCCT
AAGAAGTACGGCGGCTTCGACAGCCCCACCGTGGCCTATTCTGTGCTGGTGGTGGCCAAAGTGGAAAAGGGCAA
GTCCAAGAAACTGAAGAGTGTGAAAGAGCTGCTGGGGATCACCATCATGGAAAGAAGCAGCTTCGAGAAGAATC
CCATCGACTTTCTGGAAGCCAAGGGCTACAAAGAAGTGAAAAAGGACCTGATCATCAAGCTGCCTAAGTACTCC
CTGTTCGAGCTGGAAAACGGCCGGAAGAGAATGCTGGCCTCTGCCGGCGAACTGCAGAAGGGAAACGAACTGGC
CCTGCCCTCCAAATATGTGAACTTCCTGTACCTGGCCAGCCACTATGAGAAGCTGAAGGGCTCCCCCGAGGATA
ATGAGCAGAAACAGCTGTTTGTGGAACAGCACAAGCACTACCTGGACGAGATCATCGAGCAGATCAGCGAGTTC
TCCAAGAGAGTGATCCTGGCCGACGCTAATCTGGACAAAGTGCTGTCCGCCTACAACAAGCACCGGGATAAGCC
CATCAGAGAGCAGGCCGAGAATATCATCCACCTGTTTACCCTGACCAATCTGGGAGCCCCTGCCGCCTTCAAGT
ACTTTGACACCACCATCGACCGGAAGAGGTACACCAGCACCAAAGAGGTGCTGGACGCCACCCTGATCCACCAG
AGCATCACCGGCCTGTACGAGACACGGATCGACCTGTCTCAGCTGGGAGGTGACTCTGGCGGCTCAAAAAGAAC
CGCCGACGGCAGCGAATTCGAGCCCAAGAAGAAGAGGAAAGTCTAACCGGTCATCATCACCATCACCATTGAGT
TTAAACCCGCTGATCAGCCTCGACTGTGCCTTCTAGTTGCCAGCCATCTGTTGTTTGCCCCTCCCCCGTGCCTT
CCTTGACCCTGGAAGGTGCCACTCCCACTGTCCTTTCCTAATAAAATGAGGAAATTGCATCGCATTGTCTGAGT
AGGTGTCATTCTATTCTGGGGGGTGGGGTGGGGCAGGACAGCAAGGGGGAGGATTGGGAAGACAATAGCAGGCA
TGCTGGGGATGCGGTGGGCTCTATGGCTTCTGAGGCGGAAAGAACCAGCTGGGGCTCGATACCGTCGACCTCTA
GCTAGAGCTTGGCGTAATCATGGTCATAGCTGTTTCCTGTGTGAAATTGTTATCCGCTCACAATTCCACACAAC
ATACGAGCCGGAAGCATAAAGTGTAAAGCCTAGGGTGCCTAATGAGTGAGCTAACTCACATTAATTGCGTTGCG
CTCACTGCCCGCTTTCCAGTCGGGAAACCTGTCGTGCCAGCTGCATTAATGAATCGGCCAACGCGCGGGGAGAG
GCGGTTTGCGTATTGGGCGCTCTTCCGCTTCCTCGCTCACTGACTCGCTGCGCTCGGTCGTTCGGCTGCGGCGA
GCGGTATCAGCTCACTCAAAGGCGGTAATACGGTTATCCACAGAATCAGGGGATAACGCAGGAAAGAACATGTG
AGCAAAAGGCCAGCAAAAGGCCAGGAACCGTAAAAAGGCCGCGTTGCTGGCGTTTTTCCATAGGCTCCGCCCCC
CTGACGAGCATCACAAAAATCGACGCTCAAGTCAGAGGTGGCGAAACCCGACAGGACTATAAAGATACCAGGCG
TTTCCCCCTGGAAGCTCCCTCGTGCGCTCTCCTGTTCCGACCCTGCCGCTTACCGGATACCTGTCCGCCTTTCT
CCCTTCGGGAAGCGTGGCGCTTTCTCATAGCTCACGCTGTAGGTATCTCAGTTCGGTGTAGGTCGTTCGCTCCA
AGCTGGGCTGTGTGCACGAACCCCCCGTTCAGCCCGACCGCTGCGCCTTATCCGGTAACTATCGTCTTGAGTCC
AACCCGGTAAGACACGACTTATCGCCACTGGCAGCAGCCACTGGTAACAGGATTAGCAGAGCGAGGTATGTAGG
CGGTGCTACAGAGTTCTTGAAGTGGTGGCCTAACTACGGCTACACTAGAAGAACAGTATTTGGTATCTGCGCTC
TGCTGAAGCCAGTTACCTTCGGAAAAAGAGTTGGTAGCTCTTGATCCGGCAAACAAACCACCGCTGGTAGCGGT
GGTTTTTTTGTTTGCAAGCAGCAGATTACGCGCAGAAAAAAAGGATCTCAAGAAGATCCTTTGATCTTTTCTAC
GGGGTCTGACACTCAGTGGAACGAAAACTCACGTTAAGGGATTTTGGTCATGAGATTATCAAAAAGGATCTTCA
CCTAGATCCTTTTAAATTAAAAATGAAGTTTTAAATCAATCTAAAGTATATATGAGTAAACTTGGTCTGACAGT
TACCAATGCTTAATCAGTGAGGCACCTATCTCAGCGATCTGTCTATTTCGTTCATCCATAGTTGCCTGACTCCC
CGTCGTGTAGATAACTACGATACGGGAGGGCTTACCATCTGGCCCCAGTGCTGCAATGATACCGCGAGACCCAC
GCTCACCGGCTCCAGATTTATCAGCAATAAACCAGCCAGCCGGAAGGGCCGAGCGCAGAAGTGGTCCTGCAACT
TTATCCGCCTCCATCCAGTCTATTAATTGTTGCCGGGAAGCTAGAGTAAGTAGTTCGCCAGTTAATAGTTTGCG
CAACGTTGTTGCCATTGCTACAGGCATCGTGGTGTCACGCTCGTCGTTTGGTATGGCTTCATTCAGCTCCGGTT
CCCAACGATCAAGGCGAGTTACATGATCCCCCATGTTGTGCAAAAAAGCGGTTAGCTCCTTCGGTCCTCCGATC
GTTGTCAGAAGTAAGTTGGCCGCAGTGTTATCACTCATGGTTATGGCAGCACTGCATAATTCTCTTACTGTCAT
GCCATCCGTAAGATGCTTTTCTGTGACTGGTGAGTACTCAACCAAGTCATTCTGAGAATAGTGTATGCGGCGAC
CGAGTTGCTCTTGCCCGGCGTCAATACGGGATAATACCGCGCCACATAGCAGAACTTTAAAAGTGCTCATCATT
GGAAAACGTTCTTCGGGGCGAAAACTCTCAAGGATCTTACCGCTGTTGAGATCCAGTTCGATGTAACCCACTCG
TGCACCCAACTGATCTTCAGCATCTTTTACTTTCACCAGCGTTTCTGGGTGAGCAAAAACAGGAAGGCAAAATG
CCGCAAAAAAGGGAATAAGGGCGACACGGAAATGTTGAATACTCATACTCTTCCTTTTTCAATATTATTGAAGC
ATTTATCAGGGTTATTGTCTCATGAGCGGATACATATTTGAATGTATTTAGAAAAATAAACAAATAGGGGTTCC
GCGCACATTTCCCCGAAAAGTGCCACCTGACGTCGACGGATCGGGAGATCGATCTCCCGATCCCCTAGGGTCGA
CTCTCAGTACAATCTGCTCTGATGCCGCATAGTTAAGCCAGTATCTGCTCCCTGCTTGTGTGTTGGAGGTCGCT
GAGTAGTGCGCGAGCAAAATTTAAGCTACAACAAGGCAAGGCTTGACCGACAATTGCATGAAGAATCTGCTTAG
GGTTAGGCGTTTTGCGCTGCTTCGCGATGTACGGGCCAGATATACGCGTTGACATTGATTATTGACTAGTTATT
AATAGTAATCAATTACGGGGTCATTAGTTCATAGCCCATATATTGAGTTCCGCGTTACATAACTTACGGTAAAT
GGCCCGCCTGGCTGACCGCCCAACGACCCCCGCCCATTGACGTCAATAATGACGTATGTTCCCATAGTAACGCC
AATAGGGACTTTCCATTGACGTCAATGGGTGGAGTATTTACGGTAAACTGCCCACTTGGCAGTACATCAAGTGT
ATC (SEQ ID NO: 6)
ABE8e-NG (Addgene #138491) (Based on Next Gen sequencing)
ATATGCCAAGTACGCCCCCTATTGACGTCAATGACGGTAAATGGCCCGCCTGGCATTATGCCCAGTACATGACC
TTATGGGACTTTCCTACTTGGCAGTACATCTACGTATTAGTCATCGCTATTACCATGGTGATGCGGTTTTGGCA
GTACATCAATGGGCGTGGATAGCGGTTTGACTCACGGGGATTTCCAAGTCTCCACCCCATTGACGTCAATGGGA
GTTTGTTTTGGCACCAAAATCAACGGGACTTTCCAAAATGTCGTAACAACTCCGCCCCATTGACGCAAATGGGC
GGTAGGCGTGTACGGTGGGAGGTCTATATAAGCAGAGCTGGTTTAGTGAACCGTCAGATCCGCTAGAGATCCGC
GGCCGCTAATACGACTCACTATAGGGAGAGCCGCCACCATGAAACGGACAGCCGACGGAAGCGAGTTCGAGTCA
CCAAAGAAGAAGCGGAAAGTCTCTGAGGTGGAGTTTTCCCACGAGTACTGGATGAGACATGCCCTGACCCTGGC
CAAGAGGGCACGGGATGAGAGGGAGGTGCCTGTGGGAGCCGTGCTGGTGCTGAACAATAGAGTGATCGGCGAGG
GCTGGAACAGAGCCATCGGCCTGCACGACCCAACAGCCCATGCCGAAATTATGGCCCTGAGACAGGGCGGCCTG
GTCATGCAGAACTACAGACTGATTGACGCCACCCTGTACGTGACATTCGAGCCTTGCGTGATGTGCGCCGGCGC
CATGATCCACTCTAGGATCGGCCGCGTGGTGTTTGGCGTGAGGAACTCAAAAAGAGGCGCCGCAGGCTCCCTGA
TGAACGTGCTGAACTACCCCGGCATGAATCACCGCGTCGAAATTACCGAGGGAATCCTGGCAGATGAATGTGCC
GCCCTGCTGTGCGATTTCTATCGGATGCCTAGACAGGTGTTCAATGCTCAGAAGAAGGCCCAGAGCTCCATCAA
CTCCGGAGGATCTAGCGGAGGCTCCTCTGGCTCTGAGACACCTGGCACAAGCGAGAGCGCAACACCTGAAAGCA
GCGGGGGCAGCAGCGGGGGGTCAGACAAGAAGTACAGCATCGGCCTGGCCATCGGCACCAACTCTGTGGGCTGG
GCCGTGATCACCGACGAGTACAAGGTGCCCAGCAAGAAATTCAAGGTGCTGGGCAACACCGACCGGCACAGCAT
CAAGAAGAACCTGATCGGAGCCCTGCTGTTCGACAGCGGCGAAACAGCCGAGGCCACCCGGCTGAAGAGAACCG
CCAGAAGAAGATACACCAGACGGAAGAACCGGATCTGCTATCTGCAAGAGATCTTCAGCAACGAGATGGCCAAG
GTGGACGACAGCTTCTTCCACAGACTGGAAGAGTCCTTCCTGGTGGAAGAGGATAAGAAGCACGAGCGGCACCC
CATCTTCGGCAACATCGTGGACGAGGTGGCCTACCACGAGAAGTACCCCACCATCTACCACCTGAGAAAGAAAC
TGGTGGACAGCACCGACAAGGCCGACCTGCGGCTGATCTATCTGGCCCTGGCCCACATGATCAAGTTCCGGGGC
CACTTCCTGATCGAGGGCGACCTGAACCCCGACAACAGCGACGTGGACAAGCTGTTCATCCAGCTGGTGCAGAC
CTACAACCAGCTGTTCGAGGAAAACCCCATCAACGCCAGCGGCGTGGACGCCAAGGCCATCCTGTCTGCCAGAC
TGAGCAAGAGCAGACGGCTGGAAAATCTGATCGCCCAGCTGCCCGGCGAGAAGAAGAATGGCCTGTTCGGAAAC
CTGATTGCCCTGAGCCTGGGCCTGACCCCCAACTTCAAGAGCAACTTCGACCTGGCCGAGGATGCCAAACTGCA
GCTGAGCAAGGACACCTACGACGACGACCTGGACAACCTGCTGGCCCAGATCGGCGACCAGTACGCCGACCTGT
TTCTGGCCGCCAAGAACCTGTCCGACGCCATCCTGCTGAGCGACATCCTGAGAGTGAACACCGAGATCACCAAG
GCCCCCCTGAGCGCCTCTATGATCAAGAGATACGACGAGCACCACCAGGACCTGACCCTGCTGAAAGCTCTCGT
GCGGCAGCAGCTGCCTGAGAAGTACAAAGAGATTTTCTTCGACCAGAGCAAGAACGGCTACGCCGGCTACATTG
ACGGCGGAGCCAGCCAGGAAGAGTTCTACAAGTTCATCAAGCCCATCCTGGAAAAGATGGACGGCACCGAGGAA
CTGCTCGTGAAGCTGAACAGAGAGGACCTGCTGCGGAAGCAGCGGACCTTCGACAACGGCAGCATCCCCCACCA
GATCCACCTGGGAGAGCTGCACGCCATTCTGCGGCGGCAGGAAGATTTTTACCCATTCCTGAAGGACAACCGGG
AAAAGATCGAGAAGATCCTGACCTTCCGCATCCCCTACTACGTGGGCCCTCTGGCCAGGGGAAACAGCAGATTC
GCCTGGATGACCAGAAAGAGCGAGGAAACCATCACCCCCTGGAACTTCGAGGAAGTGGTGGACAAGGGCGCTTC
CGCCCAGAGCTTCATCGAGCGGATGACCAACTTCGATAAGAACCTGCCCAACGAGAAGGTGCTGCCCAAGCACA
GCCTGCTGTACGAGTACTTCACCGTGTATAACGAGCTGACCAAAGTGAAATACGTGACCGAGGGAATGAGAAAG
CCCGCCTTCCTGAGCGGCGAGCAGAAAAAGGCCATCGTGGACCTGCTGTTCAAGACCAACCGGAAAGTGACCGT
GAAGCAGCTGAAAGAGGACTACTTCAAGAAAATCGAGTGCTTCGACTCCGTGGAAATCTCCGGCGTGGAAGATC
GGTTCAACGCCTCCCTGGGCACATACCACGATCTGCTGAAAATTATCAAGGACAAGGACTTCCTGGACAATGAG
GAAAACGAGGACATTCTGGAAGATATCGTGCTGACCCTGACACTGTTTGAGGACAGAGAGATGATCGAGGAACG
GCTGAAAACCTATGCCCACCTGTTCGACGACAAAGTGATGAAGCAGCTGAAGCGGCGGAGATACACCGGCTGGG
GCAGGCTGAGCCGGAAGCTGATCAACGGCATCCGGGACAAGCAGTCCGGCAAGACAATCCTGGATTTCCTGAAG
TCCGACGGCTTCGCCAACAGAAACTTCATGCAGCTGATCCACGACGACAGCCTGACCTTTAAAGAGGACATCCA
GAAAGCCCAGGTGTCCGGCCAGGGCGATAGCCTGCACGAGCACATTGCCAATCTGGCCGGCAGCCCCGCCATTA
AGAAGGGCATCCTGCAGACAGTGAAGGTGGTGGACGAGCTCGTGAAAGTGATGGGCCGGCACAAGCCCGAGAAC
ATCGTGATCGAAATGGCCAGAGAGAACCAGACCACCCAGAAGGGACAGAAGAACAGCCGCGAGAGAATGAAGCG
GATCGAAGAGGGCATCAAAGAGCTGGGCAGCCAGATCCTGAAAGAACACCCCGTGGAAAACACCCAGCTGCAGA
ACGAGAAGCTGTACCTGTACTACCTGCAGAATGGGCGGGATATGTACGTGGACCAGGAACTGGACATCAACCGG
CTGTCCGACTACGATGTGGACCATATCGTGCCTCAGAGCTTTCTGAAGGACGACTCCATCGACAACAAGGTGCT
GACCAGAAGCGACAAGAACCGGGGCAAGAGCGACAACGTGCCCTCCGAAGAGGTCGTGAAGAAGATGAAGAACT
ACTGGCGGCAGCTGCTGAACGCCAAGCTGATTACCCAGAGAAAGTTCGACAATCTGACCAAGGCCGAGAGAGGC
GGCCTGAGCGAACTGGATAAGGCCGGCTTCATCAAGAGACAGCTGGTGGAAACCCGGCAGATCACAAAGCACGT
GGCACAGATCCTGGACTCCCGGATGAACACTAAGTACGACGAGAATGACAAGCTGATCCGGGAAGTGAAAGTGA
TCACCCTGAAGTCCAAGCTGGTGTCCGATTTCCGGAAGGATTTCCAGTTTTACAAAGTGCGCGAGATCAACAAC
TACCACCACGCCCACGACGCCTACCTGAACGCCGTCGTGGGAACCGCCCTGATCAAAAAGTACCCTAAGCTGGA
AAGCGAGTTCGTGTACGGCGACTACAAGGTGTACGACGTGCGGAAGATGATCGCCAAGAGCGAGCAGGAAATCG
GCAAGGCTACCGCCAAGTACTTCTTCTACAGCAACATCATGAACTTTTTCAAGACCGAGATTACCCTGGCCAAC
GGCGAGATCCGGAAGCGGCCTCTGATCGAGACAAACGGCGAAACCGGGGAGATCGTGTGGGATAAGGGCCGGGA
TTTTGCCACCGTGCGGAAAGTGCTGAGCATGCCCCAAGTGAATATCGTGAAAAAGACCGAGGTGCAGACAGGCG
GCTTCAGCAAAGAGTCTATCAGGCCCAAGAGGAACAGCGATAAGCTGATCGCCAGAAAGAAGGACTGGGACCCT
AAGAAGTACGGCGGCTTCGTCAGCCCCACCGTGGCCTATTCTGTGCTGGTGGTGGCCAAAGTGGAAAAGGGCAA
GTCCAAGAAACTGAAGAGTGTGAAAGAGCTGCTGGGGATCACCATCATGGAAAGAAGCAGCTTCGAGAAGAATC
CCATCGACTTTCTGGAAGCCAAGGGCTACAAAGAAGTGAAAAAGGACCTGATCATCAAGCTGCCTAAGTACTCC
CTGTTCGAGCTGGAAAACGGCCGGAAGAGAATGCTGGCCTCTGCCAGATTCCTGCAGAAGGGAAACGAACTGGC
CCTGCCCTCCAAATATGTGAACTTCCTGTACCTGGCCAGCCACTATGAGAAGCTGAAGGGCTCCCCCGAGGATA
ATGAGCAGAAACAGCTGTTTGTGGAACAGCACAAGCACTACCTGGACGAGATCATCGAGCAGATCAGCGAGTTC
TCCAAGAGAGTGATCCTGGCCGACGCTAATCTGGACAAAGTGCTGTCCGCCTACAACAAGCACCGGGATAAGCC
CATCAGAGAGCAGGCCGAGAATATCATCCACCTGTTTACCCTGACCAATCTGGGAGCCCCTAGGGCCTTCAAGT
ACTTTGACACCACCATCGACCGGAAGGTGTACAGGAGCACCAAAGAGGTGCTGGACGCCACCCTGATCCACCAG
AGCATCACCGGCCTGTACGAGACACGGATCGACCTGTCTCAGCTGGGAGGTGACTCTGGCGGCTCAAAAAGAAC
CGCCGACGGCAGCGAATTCGAGCCCAAGAAGAAGAGGAAAGTCTAACCGGTCATCATCACCATCACCATTGAGT
TTAAACCCGCTGATCAGCCTCGACTGTGCCTTCTAGTTGCCAGCCATCTGTTGTTTGCCCCTCCCCCGTGCCTT
CCTTGACCCTGGAAGGTGCCACTCCCACTGTCCTTTCCTAATAAAATGAGGAAATTGCATCGCATTGTCTGAGT
AGGTGTCATTCTATTCTGGGGGGTGGGGTGGGGCAGGACAGCAAGGGGGAGGATTGGGAAGACAATAGCAGGCA
TGCTGGGGATGCGGTGGGCTCTATGGCTTCTGAGGCGGAAAGAACCAGCTGGGGCTCGATACCGTCGACCTCTA
GCTAGAGCTTGGCGTAATCATGGTCATAGCTGTTTCCTGTGTGAAATTGTTATCCGCTCACAATTCCACACAAC
ATACGAGCCGGAAGCATAAAGTGTAAAGCCTAGGGTGCCTAATGAGTGAGCTAACTCACATTAATTGCGTTGCG
CTCACTGCCCGCTTTCCAGTCGGGAAACCTGTCGTGCCAGCTGCATTAATGAATCGGCCAACGCGCGGGGAGAG
GCGGTTTGCGTATTGGGCGCTCTTCCGCTTCCTCGCTCACTGACTCGCTGCGCTCGGTCGTTCGGCTGCGGCGA
GCGGTATCAGCTCACTCAAAGGCGGTAATACGGTTATCCACAGAATCAGGGGATAACGCAGGAAAGAACATGTG
AGCAAAAGGCCAGCAAAAGGCCAGGAACCGTAAAAAGGCCGCGTTGCTGGCGTTTTTCCATAGGCTCCGCCCCC
CTGACGAGCATCACAAAAATCGACGCTCAAGTCAGAGGTGGCGAAACCCGACAGGACTATAAAGATACCAGGCG
TTTCCCCCTGGAAGCTCCCTCGTGCGCTCTCCTGTTCCGACCCTGCCGCTTACCGGATACCTGTCCGCCTTTCT
CCCTTCGGGAAGCGTGGCGCTTTCTCATAGCTCACGCTGTAGGTATCTCAGTTCGGTGTAGGTCGTTCGCTCCA
AGCTGGGCTGTGTGCACGAACCCCCCGTTCAGCCCGACCGCTGCGCCTTATCCGGTAACTATCGTCTTGAGTCC
AACCCGGTAAGACACGACTTATCGCCACTGGCAGCAGCCACTGGTAACAGGATTAGCAGAGCGAGGTATGTAGG
CGGTGCTACAGAGTTCTTGAAGTGGTGGCCTAACTACGGCTACACTAGAAGAACAGTATTTGGTATCTGCGCTC
TGCTGAAGCCAGTTACCTTCGGAAAAAGAGTTGGTAGCTCTTGATCCGGCAAACAAACCACCGCTGGTAGCGGT
GGTTTTTTTGTTTGCAAGCAGCAGATTACGCGCAGAAAAAAAGGATCTCAAGAAGATCCTTTGATCTTTTCTAC
GGGGTCTGACACTCAGTGGAACGAAAACTCACGTTAAGGGATTTTGGTCATGAGATTATCAAAAAGGATCTTCA
CCTAGATCCTTTTAAATTAAAAATGAAGTTTTAAATCAATCTAAAGTATATATGAGTAAACTTGGTCTGACAGT
TACCAATGCTTAATCAGTGAGGCACCTATCTCAGCGATCTGTCTATTTCGTTCATCCATAGTTGCCTGACTCCC
CGTCGTGTAGATAACTACGATACGGGAGGGCTTACCATCTGGCCCCAGTGCTGCAATGATACCGCGAGACCCAC
GCTCACCGGCTCCAGATTTATCAGCAATAAACCAGCCAGCCGGAAGGGCCGAGCGCAGAAGTGGTCCTGCAACT
TTATCCGCCTCCATCCAGTCTATTAATTGTTGCCGGGAAGCTAGAGTAAGTAGTTCGCCAGTTAATAGTTTGCG
CAACGTTGTTGCCATTGCTACAGGCATCGTGGTGTCACGCTCGTCGTTTGGTATGGCTTCATTCAGCTCCGGTT
CCCAACGATCAAGGCGAGTTACATGATCCCCCATGTTGTGCAAAAAAGCGGTTAGCTCCTTCGGTCCTCCGATC
GTTGTCAGAAGTAAGTTGGCCGCAGTGTTATCACTCATGGTTATGGCAGCACTGCATAATTCTCTTACTGTCAT
GCCATCCGTAAGATGCTTTTCTGTGACTGGTGAGTACTCAACCAAGTCATTCTGAGAATAGTGTATGCGGCGAC
CGAGTTGCTCTTGCCCGGCGTCAATACGGGATAATACCGCGCCACATAGCAGAACTTTAAAAGTGCTCATCATT
GGAAAACGTTCTTCGGGGCGAAAACTCTCAAGGATCTTACCGCTGTTGAGATCCAGTTCGATGTAACCCACTCG
TGCACCCAACTGATCTTCAGCATCTTTTACTTTCACCAGCGTTTCTGGGTGAGCAAAAACAGGAAGGCAAAATG
CCGCAAAAAAGGGAATAAGGGCGACACGGAAATGTTGAATACTCATACTCTTCCTTTTTCAATATTATTGAAGC
ATTTATCAGGGTTATTGTCTCATGAGCGGATACATATTTGAATGTATTTAGAAAAATAAACAAATAGGGGTTCC
GCGCACATTTCCCCGAAAAGTGCCACCTGACGTCGACGGATCGGGAGATCGATCTCCCGATCCCCTAGGGTCGA
CTCTCAGTACAATCTGCTCTGATGCCGCATAGTTAAGCCAGTATCTGCTCCCTGCTTGTGTGTTGGAGGTCGCT
GAGTAGTGCGCGAGCAAAATTTAAGCTACAACAAGGCAAGGCTTGACCGACAATTGCATGAAGAATCTGCTTAG
GGTTAGGCGTTTTGCGCTGCTTCGCGATGTACGGGCCAGATATACGCGTTGACATTGATTATTGACTAGTTATT
AATAGTAATCAATTACGGGGTCATTAGTTCATAGCCCATATATTGAGTTCCGCGTTACATAACTTACGGTAAAT
GGCCCGCCTGGCTGACCGCCCAACGACCCCCGCCCATTGACGTCAATAATGACGTATGTTCCCATAGTAACGCC
AATAGGGACTTTCCATTGACGTCAATGGGTGGAGTATTTACGGTAAACTGCCCACTTGGCAGTACATCAAGTGT
ATC (SEQ ID NO: 7)
HBG ″-113 site″ gRNA
CTTGACCAATAGCCTTGACAAGG (SEQ ID NO: 8)
HBG ″-175 site″ gRNA
CACTATCTCAATGCAAATATCTGTCT (SEQ ID NO: 9)
Sequenced region
CTTGACCAATAGCCTTGACA (SEQ ID NO: 10)
Sequenced region
AGATATTTGCATTGAGATAG (SEQ ID NO: 11)
Sequenced region
CCCCACAGGGGCCCTGGCTATGG (SEQ ID NO: 12)
Sequenced region
CCCCACAGGGGCCCTGGCTA (SEQ ID NO: 13)
Full-length CD33
MPLLLLLPLLWAGALAMDPNFWLQVQESVTVQEGLCVLVPCTFFHPIPYYDKNSPVHGYWFREGAIISRDSPVA
TNKLDQEVQEETQGRFRLLGDPSRNNCSLSIVDARRRDNGSYFFRMERGSTKYSYKSPQLSVHVTDLTHRPKIL
IPGTLEPGHSKNLTCSVSWACEQGTPPIFSWLSAAPTSLGPRTTHSSVLIITPRPQDHGTNLTCQVKFAGAGVT
TERTIQLNVTYVPQNPTTGIFPGDGSGKQETRAGVVHGAIGGAGVTALLALCLCLIFFIVKTHRRKAARTAVGR
NDTHPTTGSASPKHQKKSKLHGPTETSSCSGAAPTVEMDEELHYASLNFHGMNPSKDTSTEYSEVRTQ (SEQ
ID NO: 14)
SEQ ID NO: 15 is an exemplary human genome sequence encoding CD33
(chr19:51225119-51235676) .

| exonic sequences: | intronic sequence: |
|---|---|
| 1-37 | 38-99 |
| 100-480 | 481-684 |
| 685-963 | 964-1190 |
| 1191-1238 | 1239-3585 |
| 3586-3606 | 3607-5912 |
| 5913-5922 | 5923-5929 |
| 5930-5948 | 5949-6109 |
| 6110-6140 | 6141-6680 |
| 6681-6701 | 6702-10038 |
| 10039-10135 | 10136-10476 |
| 10477-10558 | |

natural variant positions in human population:
28, 103, 126, 255. 267, 730-733, 1220, 1804, 2100-2113, 2802, 3551-3555,
3886, 6043, 6485, 6551, 6621, 6744, 7200, 7226, 8010, 8200, 8715, 8748,
8920, 9094, 9618, 10092, 10544, 10547
ATGCCGCTGCTGCTACTGCTGCCCCTGCTGTGGGCAGGTGAGTGGCTGTGGGGAGAGGGGTTGTCGGGCTGGGCCGA
GCTGACCCTCGTTTCCCCACAGGGGCCCTGGCTATGGATCCAAATTTCTGGCTGCAAGTGCAGGAGTCAGTGACGGT
ACAGGAGGGTTTGTGCGTCCTCGTGCCCTGCACTTTCTTCCATCCCATACCCTACTACGACAAGAACTCCCCAGTTC
ATGGTTACTGGTTCCGGGAAGGAGCCATTATATCCAGGGACTCTCCAGTGGCCACAAACAAGCTAGATCAAGAAGTA
CAGGAGGAGACTCAGGGCAGATTCCGCCTCCTTGGGGATCCCAGTAGGAACAACTGCTCCCTGAGCATCGTAGACGC
CAGGAGGAGGGATAATGGTTCATACTTCTTTCGGATGGAGAGAGGAAGTACCAAATACAGTTACAAATCTCCCCAGC
TCTCTGTGCATGTGACAGGTGAGGCACAGGCTTCAGAAGTGGCCGCAAGGGAAGTTCATGGGTACTGCAGGGCAGGG
CTGGGATGGGACCCTGGTACTGGGAGGGGTTTAGGGGTAAAGCCTGTCGTGCTTAGCGGGGGAGCTTGACCAGAGGT
TGATCTTCTCTCAGGCCCTCACCTGGACCCTCCCTCCTGATTCTGCATCCCCTCTTTCTCCTCACTAGACTTGACCC
ACAGGCCCAAAATCCTCATCCCTGGCACTCTAGAACCCGGCCACTCCAAAAACCTGACCTGCTCTGTGTCCTGGGCC
TGTGAGCAGGGAACACCCCCGATCTTCTCCTGGTTGTCAGCTGCCCCCACCTCCCTGGGCCCCAGGACTACTCACTC
CTCGGTGCTCATAATCACCCCACGGCCCCAGGACCACGGCACCAACCTGACCTGTCAGGTGAAGTTCGCTGGAGCTG
GTGTGACTACGGAGAGAACCATCCAGCTCAACGTCACCTGTAAGTGCTGGGCCAGGATGCTGGGGTCCCTGAGGGTG
TAGGGGAGACAGGATGGGCTGGTGCTGGGGACATTTAGTGTCCTGGAGGCCTGGCTGAGTTCGGGAGCCAGAAGGAC
ATGAGCCCTGTCCCTTCTGCATTTCTGTGGTTTCTGGCAGGAGTAAGGGGAAATGCCTACCCTTATCTCATCTCTAC
CCCCAACTGAAGGAAATCCTCTCTTCCTCTCCTAGATGTTCCACAGAACCCAACAACTGGTATCTTTCCAGGAGATG
GCTCAGGTAGGAAGGAGCCTCCCCGCCTGGGGCTGTTACTGACATTGAGTCTGTGTCAGGTTTGGTCAGATCTGGAC
TTTCAGAGTCAAATGTTCAGAGGCAAGGCCTGCAGTTAGACACGGGTAGACATCAGGCACCTTGGAAAAGGATATTT
GGGGATGACTAGCAACTTCCCCCTTGCCCATCCAAATAATGCTCTTTGTCTCCCTCCTGTCTCTGAATGTCTTGGGG
TATTTTATTTTTAATTGATATGTAATAATAGTACATATTTATGGATGGCATAGTGATGTTTCCATACTAATAATGTA
TAGTAATCAGATCAGGGTAATAGCATATCCATCATCTTGAACATTTATTATTTCATTGTTGTTGGGAACATTCAATA
TCCCCTTTCTAGCTATTTGAAGCTATCTATTATTGTTAAGCATAGTCATCCTACAGTGGTATAGAACACCAGAACTT
ATTCTTCCTTTCCAGGTGTAATCTAGTATCCTTTAACAAATCTCTCTCCTTATCATTGTTCCCCTAACCTTCCCAGC
CCTTATTATTCTCTGTTCTACTTTTTACTTCTATGAAATCAACTTCTTGTAGCTTCCACTTATGAGTGAGAACATGT
GGTATTCAACTTTCTGTTCCTAGCTTATTTCATTTAACATAATGTCCTCTAGTTCAATCTATGTTATAGTGAATAAC
AAGATTTCATTATTTTTTATGGCTGAATGATAATCCATTGTGTATATACGCCACATTTCCTTTATTTATTCATCTGT
TGTTGGACACTTAGGTTTATTTCATATCTTCCTATTGTGGATAATGCTGCAATAAACATTGAGGTGCAGACGTTTCT
TCAATATACTGATTTCCTTTCCTTTCTATAAATGCCCAGTAGTGGGGTTGCTGGATCATATGGTAGTTCTATTTGTA
GTTTTTTGAGAAACTTCCATACTCTTCTCCATAGTGGTTATACTAGTTTACATTCTGGTCAAAAGTATATAAGAGTT
CCCTCTTCTCTACATCCTCACCATCATTTGTTAATTTTCATCTTTTTTTTATCATAGTCCTCCCAACTGGGGTGATG
TTACCTCATTGTGGTTTTGATTTGCATTTCCCTGGTGATTGGTGACGTTGAGCATTTTTCATATACACTTGTTGGCC
ATCTGTATATCTTTTCTTGAGAAATGTCTACTCAGATAATTTGCCCATTTTTAAATGAGATTGGGTTTCTTTGCCAT
TGAGATGTATGAGTTCCTCGTATGTTCTGGATATGAATCACTTGTCAGATGAATAGCTGACAAATATTTTCTCCTAT
TCTGTAGGTTGCCTTTTCACTCTGTTGGTTGTTTCCTTTCTGCATAGAAGCTTTTTAGCTTGATATCATCTCATTTA
TTTACTTTTGCTTTTGTTGCTTGTGCTAGTGAGGTCTTACTCATAAAATATTTTTCCAGACCAATGTCCTAAAGCAT
TTCCCCTATGTTTTTTTCTAGTATTTTTTAAATTTTGTGTCTTATATTCAGGTCTTTGATCCATTTTGAATTGATTT
TTGTATAGGACGAGAGGTGTGAGTCTAATGTCATTCTTCTGCATATGGCACCAGTTTTCCCAGCATCATTTATTAAA
GAAACTGCTCTTTCCTCAATGAGTGTTCTTCATGCATTTGTCAAAATTCAGTTGGCTGTAGATCGTGGATTAATTTC
GGTGTTCTCTATTATGTATTATTGGTGTATGTATCTGCTTTTATGCCAATATCATGCTGTTTTGGTTACTACAGCTT
TGTAGTTTTGAAATCTTTAAATTTTTGAAATTTTGAAATTTTCTAGTTTTGAAATTTTGAAATCTTGTAGTGTGATA
CCTCCAGCTTTGTTCTTTTTTGCTTGGGATTGCTTTGACCATTCAGGCTATTTTTAGTTCCATATGAATTTTAAGAT
TGTTTCCTCTAATTCTGTGAAGAATTACATTGATATTTTGATAGAGCCAGGTTTGAATCTGTAGATTTCTTTGGGTA
GTATAATCATTTTAGCAATATTAATTCATCTGATGAGTAAGGAATGTCTTTCCATTTGTTTGTATCCTCTTCAGTTT
ATTTCCTCAGTGTTTTGTAGTTTTTCTTATTAAGGCTTGTCACCTCCTTGGTTAAATTTATTCCTAGGTATACTTCA
TTCTCTTATAGCTATTGTAAATGTGATTGCCTTCCTGATTTATTTTCAGCTAATTCATTGTGTGTAGAAATGCTACT
GATTTTTGTATATTGATTTTGCATCCTGCAAATTTACTAAATTCATTTATCAGTTCTGAGAGTTTTATTGTTAGAGT
CTTTAGGTTTTTGTTTTGTTTTGTTTTGTTTTGTTTTGTTTTTGAGATGGAATTTCACCATGTTGGCCAAGCTGGTC
TTGATCTCCTGGCCTCAAGCAATCTGCCCACTTTGGCCTCCTAAAGTGCTGGAATTACAGGCATGAGCCACCACGCC
TGGCCAAGTCTTTAGGTTTTTGTATGTTATTTGCAGAGACAATTTGACTTCCGCCTTTCCAGTTTGGATGGTTTTTA
TTTCTTTCTCTTGCCTAATTGCTCTGGCTAGGACTTTCAGTACTATGTAAAATAAGAGTCATAACAGTGGACATCCA
GTTCCTAGAGGAAAAGATTTCAGCTTTTCTCCATTCAGTATGATGTTAGCCATGGGTTTGTCATATATGGCCTTTTT
TGTGTTGAGGTACTTTCCTTCTATACCTAATTTATTGAGAGTTTCTATCATGAAACAATATTGAATTTTAACACATG
CTTTTTATTCTGCAACTATTTAGGTGATCATACGGTTTATGTCCTTCATTCTGTTGACATATGTATAACATTTATTG
ATTTGCATATGTTGAATCATTCTTGCCTTTCTGGGATTAATCCCACTTTATCATGGTATGTTATCTTTTTGATGTAT
TGTTGGATTTGATTTGCTACTATTTTGTTGAATATTTTTGCATCTATGTTCATCAGGGATATTGGCCTCTAGTTTTC
TTTTTTTATTGTCTCCTTTCTGATTTTGGTGTCATGGTTATGCTGGCCTTGTAGAATGAGTTAGGAAGAGTTGCCTC
CACTTCAATTTTTTGGAATAGTTTGAGAAGAGTTGGCATAATTTTTTTTTCTTTAAAGGTTCAGTAAAGTTCAGCAC
TGAAGCCATCCAGCCCTGGAATTTTCTTTGTTGGGGGGCCTTTTATTATTCATTCAATCTCATTACTTGTTGTTTGT
CTGCTGAAGTTTTCTATACCTTCTTGATTCAATCTCGGTAGATTATATGTGTCCAGGAACTTATCCATTTCTTCTAG
ACTTTCAAATTTGTTGGCATATTGTTCATAGTAGTGTCTAAGATCCTGTGTATTTCTGTGGTAACCATTGTGACATC
TTCTTTTTTATTTATGATTTTATTAATTTTTATGTCTTCTGTCTCTTTCTTAGTTTAGCTAATGATTGTCAATTTTA
TTTATTTTTCCAAAAAGCGAACTTGTTCATTGATTTTTTTTTAATTTCATTTATTTCTGCTCTGATCTTTATGATTT
CTTTCATTGTGCTGATTTTGGATTTGGTTTGTTCTTGCTTTCTAGTTTCTTGAAATGCACAGTTAAATGGTTTACTT
GAAATTTGTCTAATTGTTTGATGTAGGCATTTATTTCTCTCAAGTTGTCTCTTAAAACTGTTTTTGCTGTGTCCCAT
AGGTTTTGGTATATTTTATTTCTATTTTTATTTATTTTGAGAAATTTTTAAATATCATTCTTAATTTCTTCCTTCAC
TATTGGTCATTTAGAATCATTTTGTTTCATTTCTGTGTATTTGTATAGTTTGCATGTTTCCCTTGGTATTGATTTTT
AGTTTTATTCAATTGTAGTCAAATAAGATACTTGATACATTTTGGTTTTTAAAAATTTTTGGCACTTGTTTTGTGTT
CTAACATATGGTCGATCCTTGGGAATGTTGCACATGCTGATGAAACCATGTGTATTCTGCAGCTGTCGGTTGAAATG
TTCTGTAAATATCTTAGGTTCATTTGGTATATGGTGCAGTTTAAATCCAACGTTTATTTGTTAATCTTGTCTAGATG
ATTTGTTCAATGCTGAGAGTGGGGCGTTGAAGTCCTCAACTATTATTGTATTGGAGTCTATCTCTCCCTTTATATCT
AATAATATTTGCTTTACATATCTGGGTGCTCTGGTGTTGTGTGCATATGTATTTACAGTTGTTATATTATAGTGCTG
AACTGACCCCTTTATAATAATATAATGTCCTTCTTTGTCTCTTTACAGCTTTTGACTTGTAGTCCGTTTTGTCTGAG
ATAAGTATAGCTATTCCTGCTTCCTTTCATTTCCACTTGGGTAGAATATCTTTTTCCATCTCTTCCTTTTCAGTCTA
TGTGTGTCTTCTAGGTGAGATAAGTTTCTTGTAAGCAGTATATAGCTGTGTTGGTAGAAGGGCTGAGGCAGGGCTTG
CTTGTCTGACATAATGTAAAAGAGTCTTGGAACATGTCCTGGGTCCAGGGTCTCAAACCCCTCGTGGCCTATGGAAC
ACCAAGCTCTGTGCCTAAGGGTGGAAGGCTGCCCTGCCACACTGCAATCTAAGCCCAGGGCATAAAACCCCTCGTGG
CTTGGAAAGAATCCAGGGCTCTGGGCATAAAACCCCTCATAGCCTCTGGAATGTGTCCAGACTTGCTGGCCCCTTGC
TCCTTGCTCTCCCAGGATCATAAATTGATTGTATCTTGAGTGAAAAGAACTTGTTCTCCATTATTTCAAGTAGCAGA
GCATATGCTAAACCGTCACAGCTATGCTTGATGCACCGCTACCTTTCTACCCCAAAGTCCTCACGTTCTCACTTGTC
TATCCCCACTTCTGCACGTCCTCACCACCTGCTTCTTTGTTTGATTACCAATAAATAGTGTGGGCTCCCAGAGCTCG
GGGCCTTCACAGCCTCCATACTAGCGTCGGCCCCCTGGACTCACTTTATGTACTATTAACTTGTCTTGTCTCATTCC
TTTGACTCCGCTGGACTTCGTGGCCCCCACGGCCTAGTGTTGGATCTGATCACCCCAACAAGCTGAGTCTAGATTTT
CTTTTCATTCATTCAGGCAGTCCATATATTTTAAATGGGACAATTTAATCCATTTACATACACATTATTATTAATAG
GTTATTTTCATTTCATTGATTGTTTTCTGATTGTTTTATATATTCCTGGTTCCTTACTTCCCCTCTTATTGTTTCTT
TTTGTGGTTGGCTGATGTTTTTTTTTTTTTTGTAGTGATAAGATTTGATTCCTTTCTCTTTCTTCTTTGTGTATGGG
CTGTCAGTGAGTTTTAAGTTCACGTGTTTTTGCCTTTTCACTTCCAGATGTAAGACTCCCTTGAGCATTTCTTTTCT
TTTTCTTCTCTTATTTATTTTTATTATTTTTTTTTTGAGAAAGTGTCTCACTCTGTCGCCCAGGCAGGAGTGCAGTG
GCATGATCACGGCTCACTATAGTCTCGACCTCCTGGGCTTAAGCAATCTTCCTGCCTTAACCTCCCAAGTAGCTGGG
ACTACAGGCATGTGCCACCACGCCCAGCTAATTTTTGTGTTTCTTGTAGAGGTAGGGTGTTGCCATTTGCCTAAGCT
GGTCTCAAATTAAAGAGCTCAAGTGGTCCACCTGCCTGCCTTCACCTCCCAATGTGCTGGGATTATAGGCATGAGCC
ACACTGTGCCTGGCCCCTTGAGCATTTCTTGTAAGGCCAGTCTAAGAGTGATTAGAATTCCCTTAGTTTTTGCTTAT
CTATGAAATATTTTATTTCTCCTTCTTTTCTGAAAGATAGCTTTTCTGGGTATAGTATTTTTGACTGTTAAGTTTTT
TATCTTTCAGTACTTTGAGTATGTCATCCCATTCTATCCTGGCCTATATAATGTTACTGCTGAGAAACTCACTGTTA
GTCTAATAAGGATAATCCTATATGTGACTAGATACTTTTACCTTGCTGTTTTTACAATTCTTTACTTGACTTTTGAC
AATTTGGCATAATGAGCTTTGGAGAGGACTTGCTTGGGTTGAATATTTTGAGAGTACTTTGAGCTTCCTGGACCTGG
ATGTCCTTCTAGTTCCCAAGGCTTGGGAAGTTTTCACCTATTACTGGATTAAATATGTTTTCTACACCTTTTCCATT
CTCTTCTCCTCCTGGAAATACCATAATGTGAATATTTGCTTGATTGTGTCCCATGAGTCCTGTAGGTTTCCTTCGTT
CTATTTTATTCTCTTATTTTTACCTGCCTGTGTTATTTCAGAAGATCTGTCTTCAAGTTCAGAAATTATTTTTTCTT
CTTGACCTAGCCTGTTGTTGAAGCTCTCGATTGCGGTTTTTTATTTCATTTATTGAGTTCTCAGCTGTAGGAGTTCT
GCTTTGTTCTTTTATATAATATCTATCTCTCTGTTAAATTTCTCTTTCAAGTCATGAATTAAAACAATGGGACACAG
GTGCCCAACTACTTGGCTGACCTGGGGGCATATCTGCTGGAGGTGCCAACATGGCTGTTTTGCAGGGCTGAGATGAA
GCTGAATGACTCTTGGCTGGCCTAGGTGTGTTTTTGCCAGGAGTAGCACTCAGAGCTTTATCTAGGGTTTGGGATGT
GAGTGTAAGACTGCTCAGCTGGCCTAGGGGGTGTACCAGCCAGTGGTAGCCCATGGGGCTGTTTCTCAGGCCTGGAA
TGCAAGCACATTCTGCCTGGGGTCATGTCTAAAAGGGTTGGCTCACAAGGCTGTTTCTCAGGCCCTAATTGTGGGAG
AGTGGCCTTTGGGCAGGCCAGAGTCATGTCCACAGAAGGCGTCTGGGCACCGTAAGGCTGTTTCTCAGAGCCTGTGT
GTGAGCACATAACCACTACCCCAGCCTGGGGATGTATCAACTCTTTGTTGGCTCAGAGGTCTCTCCCATTCAGGTGA
GCATGCACAGTAGTTTGGCCAACTCAATTGTGTGTTCGCCCTGAGTGGGACTATAAGACCTTTCCTCCAGCTGGAAG
TACGGGCAGCAGGGGTTGGTTTCTCTGCTGTTCAGGGCCAGAGTCCCAGCCAATCCTGGGCCCAGGCTCCATGCAGC
TCTAATTGTGGTATTCAGCCACTACTGCAGGTTTAGTGGAATGAAGATGCACAATGATAAAGAGGTGCATGCCACTG
GCCCCCAGAGGAGGGTGCACTCCAGAGATGGCTGTGGTCTCAAGATGGTTCTGTGTTGTAGCAGCTTGCCCGCAGGG
GCTGGTTAGGGAGTTGGGAGTGCACACCAAATGCTCCATGCAGCTGTGTGAATTCCTGGCAGCTCTTCCAACTGTGC
TCAGAGCTTGTGAGGACTGTAAGATTAACCTGTAGTAAGGAATGTAGGTATCTGCAGTGGCACTGGAGGTTGGTTGG
ATTCCTCTGCTTATCATTTCCCTACAAGGGGAAATCCTTCCTGTCTCTGGGACAAACCAATCTGGGCTGGGGAGATG
GAGCTGCAAAGCCCGGGTGCCTCCATGCTGCCCTCCTGGGTTTCCAATTACCACAGGTAACTCTCCACTCCCTTGCT
GCACTACACTACTCTCCCTTCGACACTCCACTCAAATCTTTGCTGTGGTTTATTCATTGCCTTGGTCCTTTCTTGTC
TGGTGACACGGGGGAGGATGAGCTCCAGGCACCTCCGGTGAGCCATTTTGCTCCAATGGGGGCATTTTTTTTTAATA
GGTTTTATTTTTCAGAGTAGTTTTTGTTTCACAGCAAAATTGAGTGGAATCTTCTAGTCGCTGATCATCTTGGGAGC
ATTTATAAATGAACCTTATTTTTCATGAAGAAATTGAGCAGAAGATACTAAGACTTCCCGTATGCCCTCTACCCTTA
CACATAGTTTCCCCGGCCATCAGCATCCCCCATCAGAGTGGTACATTTGTTACAGTCAATAAAACTACATTGACATA
TCATTGTCACCTGAAGCCCATAGTTTACATTAAAGTTCACTCTTGGTGTTGTACATTTTACAGGCTTTTTAAAAATG
TATAATGACATGAATCCACCATGAGAGTATCATATAGAATAGTCACACTTCCCTAAAAATCTCTTTAGGGCATTTTT
TTCTACTGTCCATACCTCAACCCTTAGCCCTGGCCTCTGTCCAAAGACCAGTGCTCTCTCCACTGCCCTATTCCAAT
TAATAATGGCATCTGGCACCTCAGTGGACAGTGAGCCCAGTGAGAGCAGGAACAGTTCCCTCAGTAGTGGTTATCAA
ACTGTTAACAATGATGCTCAGAGACACGCCCCTGACTCTGAGTGTTGGGACCTAGAAGGCACAGCCAGGCAGGTCCA
GGAGAACTGTCTGGGTCTAAGAAGGTCTGAGAACCACCTCCCTGCCCCACCCTGCTTCCAGGCCCTTTTTAAGGCCA
AAAGGACCACCTTTGACCCTAAGTGATGGGGCCAGTGGGAAGAAAGAAGAGACAAGGCCTATCAGCATTCCAGTGCT
TTCTCTCTCTCTCATCCAAGAGGCTCAGAGCTTCACAGTCCTTCAGGGGCTATGTCTGAGGTTCATTTCAGAAAGAC
CCAGGGTGGAGAGGAACCTGAGTCCTAGGAGAGATGATGTTTTGTGCACCAGAGAGAGAGGGTGGGACAAGAGGTGT
CAGGTGCACTGTGTACTTCATCTCATGGTCGTGGTCAATATTGATGTCTATGATGGGTGGGAAGATCTAGGAGCTAA
ACCCCATTTTGGAGGTGAAGTCACCCCTCTCTACATGCTGGAGAGGAGGATACACATACCTGTTTATCTAGATTAGA
ATTCACCCCAAATCTTTTTTGTCTGCAGGGAAACAAGAGACCAGAGCAGGAGTGGTTCATGGGGCCATTGGAGGAGC
TGGTGTTACAGCCCTGCTCGCTCTTTGTCTCTGCCTCATCTTCTTCATGTGAGCATTTTCTCTGGGTCAGGCATGGG
CCAGAGGTGAAGAGGATGGACCTGGTGTAGAAGGGTCCTGGAGGGGCTGTGAGGGCTGGAGAAAGGGCAGGGGGTGT
GATGATGTACAGAATCCAGCCTGTGGCCACTGGGATAGGCGTGGGTCTATTCCAGGGCCCTGATCTCAGATGTCCAA
GGAGTGGGAGGTAGAGGGAGACCTTGTGACTAAGTCTTGTTTGAGGGCTCCTGGATTAATCCCACCCTTTACCTGCC
AAAGTCCCTCATTCCAGGCTCATAACAATGGCCCCACAGCCTGAGAAAACCAGGCTCAAAGACCCTGGTGTCTCCCA
TCAGAGTGAAGACCCACAGGAGGAAAGCAGCCAGGACAGCAGTGGGCAGGAATGACACCCACCCTACCACAGGGTCA
GCCTCCCCG (SEQ ID NO: 15)
A Gly-Ser linker
GGSGGS (SEQ ID NO: 16)
CD33^{ΔE2}
MPLLLLLPLLWADLTHRPKILIPGTLEPGHSKNLTCSVSWACEQGTPPIFSWLSAAPTSLGPRTTHSSVLIITP
RPQDHGTNLTCQVKFAGAGVTTERTIQLNVTYVPQNPTTGIFPGDGSGKQETRAGVVHGAIGGAGVTALLALCL
CLIFFIVKTHRRKAARTAVGRNDTHPTTGSASPKHQKKSKLHGPTETSSCSGAAPTVEMDEELHYASLNFHGMN
PSKDTSTEYSEVRTQ (SEQ ID NO: 17)
Linker: (SGGS)₂-XTEN-(SGGS)₂ (SEQ ID NO: 18)
CD33E2 splice gRNA for CD33 knockdown: CCCCACAGGGGCCCUGGCUA (SEQ ID NO: 19)
CD33 exon 2 splice acceptor site 2 gRNA for CD33 knockdown:
CCCACAGGGGCCCUGGCUAU (SEQ ID NO: 20)
CD33 exon 3 splice acceptor site 5a gRNA for human CD33 knockdown:
CCUCACUAGACUUGACCCAC (SEQ ID NO: 21)
CD33 exon 3 splice acceptor site 5b gRNA for rhesus CD33 knockdown:
UCUCACUAGACUUGACCCAC (SEQ ID NO: 22)
FV Pol gene DNA
To generate integration deficient foamy vector, either bolded A is mutated
to C in underlined sequence or underlined A is mutated to C in bolded
sequence
ATGAATCCCCTCCAACTGTTGCAGCCTCTGCCCGCAGAGATCAAAGGGACTAAACTGCTGGCTCATTGGGACTC
TGGAGCAACCATAACATGCATACCAGAAAGCTTCCTTGAGGACGAGCAGCCTATCAAAAAAACATTGATTAAGA
CGATCCACGGGGAAAAGCAGCAGAACGTGTATTACGTTACCTTTAAGGTGAAGGGCCGGAAAGTCGAGGCCGAG
GTCATTGCCTCTCCATACGAATACATTCTGCTCTCACCCACCGACGTGCCATGGTTGACCCAGCAGCCTCTTCA
GCTGACTATCCTGGTCCCTTTGCAGGAGTACCAGGAAAAGATTCTGAGCAAGACGGCGCTTCCCGAAGATCAGA
AACAGCAGCTGAAGACCCTCTTCGTGAAATACGATAATCTCTGGCAGCACTGGGAAAACCAGGTGGGCCATCGG
AAGATTCGACCCCACAATATCGCCACGGGCGACTATCCACCTAGGCCTCAGAAGCAGTATCCCATCAACCCAAA
AGCAAAACCAAGCATCCAGATCGTCATCGATGATTTGCTTAAGCAAGGAGTGCTCACCCCACAAAATAGCACTA
TGAACACCCCAGTGTACCCCGTGCCCAAACCGGACGGCAGATGGAGAATGGTATTGGACTATCGCGAAGTTAAC
AAAACCATACCTTTGACCGCAGCCCAGAATCAACACAGCGCCGGCATCTTGGCTACGATCGTGAGACAGAAGTA
CAAAACAACTCTCGATCTGGCCAACGGCTTTTGGGCTCACCCAATCACTCCAGAGAGCTACTGGCTTACCGCCT
TTACATGGCAGGGGAAACAATACTGTTGGACCCGGCTGCCTCAGGGGTTCTTGAATTCACCCGCACTGTTTACA
GCTGACGTCGTTGATCTGCTGAAAGAAATCCCCAATGTGCAGGTATACGTGGACGACATCTATCTTTCCCACGA
CGATCCAAAAGAGCATGTTCAGCAGCTCGAAAAAGTTTTCCAGATCCTGCTGCAGGCTGGTTATGTCGTCTCAC
TCAAGAAGTCTGAGATAGGACAAAAGACTGTGGAGTTTCTGGGATTTAACATCACCAAGGAAGGACGGGGATTG
ACTGATACGTTCAAGACTAAGCTGCTCAACATTACTCCTCCCAAGGATCTTAAGCAGCTGCAGAGTATTCTTGG
CTTGCTCAATTTTGCCCGGAATTTTATCCCTAACTTCGCTGAGCTTGTTCAGCCCCTGTATAATCTGATAGCCT
CCGCCAAGGGTAAGTACATCGAATGGAGCGAGGAGAATACTAAACAGTTGAACATGGTGATTGAGGCACTTAAC
ACTGCCTCCAACTTGGAGGAACGACTGCCAGAGCAGCGACTTGTGATTAAAGTGAACACCTCACCAAGTGCGGG
GTACGTGCGCTACTACAACGAGACAGGCAAAAAGCCCATAATGTACCTGAACTATGTCTTCTCAAAAGCTGAGC
TCAAGTTTAGCATGCTCGAGAAGCTGCTTACTACCATGCACAAGGCCCTGATAAAGGCCATGGACCTTGCCATG
GGGCAAGAAATCCTCGTGTACAGCCCCATCGTTTCCATGACGAAGATCCAGAAAACACCACTGCCCGAACGAAA
GGCCTTGCCTATCAGATGGATTACTTGGATGACCTACCTTGAGGACCCCCGCATCCAGTTTCATTATGATAAGA
CCCTGCCTGAACTGAAACACATCCCAGACGTGTACACCTCCAGTCAGTCCCCAGTCAAGCACCCTTCTCAATAT
GAAGGAGTGTTTTATACCGATGGGAGTGCCATCAAATCCCCTGACCCCACAAAAAGTAACAACGCCGGTATGGG
TATCGTCCACGCGACCTATAAGCCCGAGTATCAGGTACTGAACCAGTGGTCCATCCCGCTGGGGAATCATACCG
CCCAGATGGCGGAAATTGCCGCAGTCGAGTTTGCCTGCAAAAAGGCATTGAAAATCCCAGGGCCTGTCCTGGTC
ATCACCGACTCTTTCTACGTAGCCGAGTCAGCCAATAAGGAACTGCCCTATTGGAAAAGTAATGGCTTCGTGAA
CAACAAGAAGAAGCCACTGAAACATATTAGCAAATGGAAATCTATTGCCGAGTGTCTGTCTATGAAGCCCGACA
TCACTATCCAGCACGAAAAGGGCCATCAGCCCACCAACACTAGTATCCATACGGAGGGAAACGCTCTGGCCGAT
AAGCTAGCCACTCAAGGGAGTTACGTCGTGAACTGCAACACCAAGAAACCTAACCTTGACGCCGAATTGGACCA
ATTGCTGCAGGGACATTACATAAAGGGCTACCCCAAGCAGTATACCTATTTTCTGGAAGACGGCAAGGTAAAAG
TGTCCCGGCCAGAGGGCGTCAAGATCATCCCGCCACAAAGCGACAGACAGAAAATCGTTCTGCAGGCCCACAAC
CTCGCTCATACTGGGCGCGAAGCTACTCTGCTCAAGATTGCCAATCTGTATTGGTGGCCGAATATGAGAAAAGA
CGTCGTAAAGCAACTGGGGCGCTGTCAGCAGTGTTTGATCACTAACGCAAGTAACAAAGCAAGTGGGCCGATTC
TTCGACCAGACCGCCCTCAGAAACCGTTCGATAAGTTTTTTATAGATTACATTGGACCTCTGCCTCCCAGTCAA
GGCTACCTCTACGTGCTGGTAGTGGTCGATGGCATGACGGGATTCACATGGCTGTACCCGACCAAGGCGCCGAG
TACTTCCGCGACGGTCAAGAGCCTTAACGTTCTCACCTCCATAGCTATCCCCAAAGTTATCCACTCCGACCAGG
GCGCAGCTTTCACCAGCTCTACCTTCGCGGAGTGGGCCAAAGAGAGGGGGATTCACTTGGAATTCTCAACGCCT
TACCACCCCCAATCTAGCGGAAAGGTCGAGAGAAAAAATTCAGATATCAAAAGACTGTTGACCAAGCTGCTTGT
TGGCCGCCCTACAAAGTGGTATGACCTCCTGCCTGTCGTCCAGCTGGCACTGAACAACACCTACAGCCCCGTGC
TCAAGTATACACCTCATCAGTTGCTGTTTGGTATTGATAGTAACACTCCTTTCGCAAATCAGGATACGTTGGAT
CTCACTCGCGAAGAAGAGCTCAGTTTGCTGCAGGAGATACGCACGAGTCTGTACCACCCTTCCACTCCTCCCAC
TTCTAGTAGGTCTTGGTCTCCAGTTGTGGGACAGCTTGTTCAGGAAAGAGTCGCCCGGCCCGCATCACTGCGGC
CCCGGTGGCACAAACCGTCTACTGTACTGAAGGTGCTCAACCCACGGACGGTGGTAATCCTTGACCATCTCGGA
AACAACCGGACAGTGTCAATCGATAACCTCAAGCCAACCTCCCACCAAAACGGCACAACCAATGACACAGCCAC
AATGGATCATTAG (SEQ ID NO: 23)
FV Pol gene AA
To generate integration deficient foamy vector (IDFV), underlined D is
mutated to A (separately, 2 different versions)
MNPLQLLQPLPAEIKGTKLLAHWDSGATITCIPESFLEDEQPIKKTLIKTIHGEKQQNVYYVTFKVKGRKVEAE
VIASPYEYILLSPTDVPWLTQQPLQLTILVPLQEYQEKILSKTALPEDQKQQLKTLFVKYDNLWQHWENQVGHR
KIRPHNIATGDYPPRPQKQYPINPKAKPSIQIVIDDLLKQGVLTPQNSTMNTPVYPVPKPDGRWRMVLDYREVN
KTIPLTAAQNQHSAGILATIVRQKYKTTLDLANGFWAHPITPESYWLTAFTWQGKQYCWTRLPQGFLNSPALFT
ADVVDLLKEIPNVQVYVDDIYLSHDDPKEHVQQLEKVFQILLQAGYVVSLKKSEIGQKTVEFLGFNITKEGRGL
TDTFKTKLLNITPPKDLKQLQSILGLLNFARNFIPNFAELVQPLYNLIASAKGKYIEWSEENTKQLNMVIEALN
TASNLEERLPEQRLVIKVNTSPSAGYVRYYNETGKKPIMYLNYVFSKAELKFSMLEKLLTTMHKALIKAMDLAM
GQEILVYSPIVSMTKIQKTPLPERKALPIRWITWMTYLEDPRIQFHYDKTLPELKHIPDVYTSSQSPVKHPSQY
EGVFYTDGSAIKSPDPTKSNNAGMGIVHATYKPEYQVLNQWSIPLGNHTAQMAEIAAVEFACKKALKIPGPVLV
ITDSFYVAESANKELPYWKSNGFVNNKKKPLKHISKWKSIAECLSMKPDITIQHEKGHQPTNTSIHTEGNALAD
KLATQGSYVVNCNTKKPNLDAELDQLLQGHYIKGYPKQYTYFLEDGKVKVSRPEGVKIIPPQSDRQKIVLQAHN
LAHTGREATLLKIANLYWWPNMRKDVVKQLGRCQQCLITNASNKASGPILRPDRPQKPFDKFFIDYIGPLPPSQ
GYLYVLVVVDGMTGFTWLYPTKAPSTSATVKSLNVLTSIAIPKVIHSDQGAAFTSSTFAEWAKERGIHLEFSTP
YHPQSSGKVERKNSDIKRLLTKLLVGRPTKWYDLLPVVQLALNNTYSPVLKYTPHQLLFGIDSNTPFANQDTLD
LTREEELSLLQEIRTSLYHPSTPPTSSRSWSPVVGQLVQERVARPASLRPRWHKPSTVLKVLNPRTVVILDHLG
NNRTVSIDNLKPTSHQNGTTNDTATMDH* (SEQ ID NO: 24)
PGK promoter
GGGGTTGGGGTTGCGCCTTTTCCAAGGCAGCCCTGGGTTTGCGCAGGGACGCGGCTGCTCTGGGCGTGGTTCCG
GGAAACGCAGCGGCGCCGACCCTGGGTCTCGCACATTCTTCACGTCCGTTCGCAGCGTCACCCGGATCTTCGCC
GCTACCCTTGTGGGCCCCCCGGCGACGCTTCCTGCTCCGCCCCTAAGTCGGGAAGGTTCCTTGCGGTTCGCGGC
GTGCCGGACGTGACAAACGGAAGCCGCACGTCTCACTAGTACCCTCGCAGACGGACAGCGCCAGGGAGCAATGG
CAGCGCGCCGACCGCGATGGGCTGTGGCCAATAGCGGCTGCTCAGCGGGGCGCGCCGAGAGCAGCGGCCGGGAA
GGGGCGGTGCGGGAGGCGGGGTGTGGGGCGGTAGTGTGGGCCCTGTTCCTGCCCGCGCGGTGTTCCGCATTCTG
CAAGCCTCCGGAGCGCACGTCGGCAGTCGGCTCCCTCGTTGACCGAATCACCGACCTCTCTCCCCAG (SEQ
ID NO: 25)
SV40 promoter:
GGTGTGGAAAGTCCCCAGGCTCCCCAGCAGGCAGAAGTATGCAAAGCATGCATCTCAATTAGTCAGCAACCAGG
TGTGGAAAGTCCCCAGGCTCCCCAGCAGGCAGAAGTATGCAAAGCATGCATCTCAATTAGTCAGCAACCATAGT
CCCGCCCCTAACTCCGCCCATCCCGCCCCTAACTCCGCCCAGTTCCGCCCATTCTCCGCCCCATGGCTGACTAA
TTTTTTTTATTTATGCAGAGGCCGAGGCCGCCTCTGCCTCTGAGCTATTCCAGAAGTAGTGAGGAGGCTTTTTT
GGAGGCCTAGGCTTTTGCAAAAAGCTCCCGGGAGCTTGTATATCCATTTTCG (SEQ ID NO: 26)
dESV40 promoter:
GCATGCATCTCAATTAGTCAGCAACCATAGTCCCGCCCCTAACTCCGCCCATCCCGCCCCTAACTCCGCCCAGT
TCCGCCCATTCTCCGCCCCATGGCTGACTAATTTTTTTTATTTATGCAGAGGCCGAGGCCGCCTCGGCCTCTGA
GCTATTCCAGAAGTAGTGAGGAGGCTTTTTTGGAGGCCTAGGCTTTTGCAAAAAGCTT (SEQ ID NO: 27)
Human telomerase catalytic subunit (hTERT) promoter:
TTGGCCCCTCCCTCGGGTTACCCCACAGCCTAGGCCGATTCGACCTCTCTCCGCTGGGGCCCTCGCTGGCGTCC
CTGCACCCTGGGAGCGCGAGCGGCGCGCGGGCGGGGAAGCGCGGCCCAGACCCCCGGGTCCGCCCGGAGCAGCT
GCGCTGTCGGGGCCAGGCCGGGCTCCCAGTGGATTCGCGGGCACAGACGCCCAGGACCGCGCTCCCCACGTGGC
GGAGGGACTGGGGACCCGGGCACCCGTCCTGCCCCTTCACCTTCCAGCTCCGCCTCCTCCGCGCGGACCCCGCC
CCGTCCCGACCCCTCCCGGGTCCCCGGCCCAGCCCCCTCCGGGCCCTCCCAGCCCCTCCCCTTCCTTTACCGCG
GCCCCGCCCTCTCCTCGCGGCGCGAGTTTCAGGCAGCGCTGCGTCCTGCTGCGCACGTGGGAAGCCCTGGCCCC
GGCCACCCCCGCCAGATCT (SEQ ID NO: 28)
RSV promoter derived from the Schmidt-Ruppin A strain:
acgcgtcatgtttgacagcttatcatcgcagatccgtatggtgcactctcagtacaatctgctctgatgccgca
tagttaagccagtatctgctccctgcttgtgtgttggaggtcgctgagtagtgcgcgagcaaaatttaagctac
aacaaggcaaggcttgaccgacaattgcatgaagaatctgcttagggttaggcgttttgcgctgcttcgcgatg
tacgggccagatattcgcgtatctgaggggactagggtgtgtttaggcgaaaagcggggcttcggttgtacgcg
gttaggagtcccctcaggatatagtagtttcgcttttgcatagggagggggaaatgtagtcttatgcaatactc
ttgtagtcttgcaacatggtaacgatgagttagcaacatgccttacaaggagagaaaaagcaccgtgcatgccg
attggtggaagtaaggtggtacgatcgtgccttattaggaaggcaacagacgggtctgacatggattggacgaa
ccactaaattccgcattgcagagatattgtatttaagtgcctagctcgatacaataaacgccatttgaccattc
accacattggtgtgcacctccaagctgggtaccagctgctagcaagcttgagatct (SEQ ID NO: 29)
hNIS promoter:
gagtagctgggattacaggcatgtgccaccacgcctcgctaatattagtatttttcatacagacaagatctcac
tatgttgctcagggtagtctcgaattctgggactcaaatgatcctcccacttcagcctcccaaagtgctgggat
tacaggcataagccatcatgcccggcctctgacgctgtttctttcaacccccaggatttcagattccaccagct
tatggagaagggaaccaagttcgagatgcgtgattgcccagaaagttggaggctgagctgagacttgaacccag
agaccagaacctccagaggtcaaagtcctcctcctgggtcccccagagaagggccctgagatgacagctcgttg
gtcctcatggaagcgtgacccccccagtagactttctcccacacccaaccttggtttcctcatctatatgatag
ggacaagccagactctacctccctggtggtcatggtctccgcttattcgggttcataaccttaaaggcccctcg
caccacctcagtgagccatttatgcctggcacagggccaactctcagtgcatatctgcaaaggaaccaatgaat
gagtgaatgaagtgacaaatgaataaaggaataaatgaatgaggcacttatcatgtaccaggctttcgttacca
cgtcccatttattcctctgaggcagggtctattttatccttgttacagatggggaaactaaggcccagggagga
gcaaagtcttccccaagtatgtacccactcagaacttgagctctgaatgtctcccacccagcttagcccaagag
cggggttcagtgatgcccaccccctaaggctctagagaaagggggtaggcccacatgccagtttgggggtggta
aagccaggtaagttttctttatgggtcccctgaaaccctgaaagtgaaccccagtcctgcatgaaagtgagctc
cccatagctcaaggtattcaagcacaatacggctttgagtgctgaagcaggctgtgcaggcttggatagtgaca
tgccctctctgagectcaatttccccacctgtcaacagcagacagtgacagctgtgatcaggggatcacagtgc
atggggatgggtgggtgcatggggatggaggggcatttgggagccctccccgataccaccccctgcagccaccc
agatagcctgtcctggcctgtctgtcccagtccagggctgaaagggtgcgggtcctgcccgcccctaggtctgg
aggcggagtcgcggtgacccgggagcccaataaatctgcaacccacaatcacgagctgctcccgtaagccccaa
ggcgacctccagctgtcagcgctgagcacagcgcccagggagagggacagacagccggctgcatgggacagcgg
aacccagagtgagaggggaggtggcaggacagacagacagcaggggcggacgcagagacagacagcggggacag
ggaggccgacacggacatcgacagcccatagattcctaacccagggagccccggcccctctcgccgcttcccac
cccagacggagcggggacaggctgccgagcatcctcccacccgccctccccgtcctgcctcctcggcccctgcc
agcttcccccgcttgagcacgcagggcgtccgaggacgcgctgggcctccgcacccgccctcatggaggccgtg
gagaccggggaacggcccaccttcggagcctgggacta (SEQ ID NO: 30)
Human glucocorticoid receptor 1A (hGR 1/Ap/e) promoter:
ATTAGAGATTGTAAATTGGGCTCTGAGCTTCCTACCAACAAAAGCACAAAGGAAAATATGATCACTGGTATTAA
AAAAAAACACCTATGGTTTCCAAAAGATTAAAACAAACCAGCAGTTTTATAGAAGCTAACACTAAAATCTAAAG
GAACTACGTTCTATGGAGCCACTTAATATGGATAAACACTTTGACAATATTCTTTCAACAACTACAGTAACAAG
TTTCTTAGAGTCCATTTCTTTTTACATCCATAATGAATTGTAAATCTTTTCTACTTCTTAAGTAAAACATCACC
ACTTAATTCTGGTAACTTTTCCATATTAACTTTTTAGAACAATTGCAAACGTACCATAAATGATTGTTGTCACA
GTGGTAACTATTTGACCCTGACTGTTATTTTGTATATAGCAGCTTTTAAAATAAAAAGGCAACAAGTTTCTAGG
CGTAATTTCCACAGATCTTTTATGTAAAACAATGACATCCTTTGCAACTTCTGCCATTTAATCTATCTCAAGCA
AGCTCTCTGGAAACAAATCTATTTGAAAGATTCTATTGTAATTAGAAATCAGGGTAACTGAATGCACTAGATGA
AAACCTTCTGACTGGGGCCAATGAAGTCAATAAAGTCAAAACTGCTGTGAATGCTCAACTGTCTGCAGATCAGA
TGTCTTGGGATGGAATCCGTTCTCGAGGCCACCATCATTAATATCAATTTGGCCATGTAATACAAGCCTCACTT
GTTCCACTGTTACAAATGTGCTTAAAACTGAGCTCATTTACAATCCAAATACATATGTAGGATGGTAACCAAGG
CATCACACTAATTTAGGTATTATGTTTTAGGGGGAACAAAAGGTATGTTAATATTTTATTCATCTCCAAATTAA
CTATAAATTGTGCATTCTTGCATAGATCCTCCTTGGGAATGAGAAATTAGGAAAATCCAGTTGTTAAAATGAAT
GCCTAAAATCAAAATAAAATTTGTTTTTCTGGCACCTGCTTGATGACACAGACTAATAACCAATGACAAAATTC
CCTTGAACCCAAGTTTTCATTTCCTCCTATTGTGTGGTC (SEQ ID NO: 31)
Light chain of hP67.6:
MSVPTQVLGLLLLWLTDARCDIQLTQSPSTLSASVGDRVTITCRASESLDNYGIRFLTWFQQKPGKAPKLLMYA
ASNQGSGVPSRFSGSGSGTEFTLTISSLQPDDFATYYCQQTKEVPWSFGQGTKVEVKRT (SEQ ID NO: 32)
Heavy chain of hP67.6 includes:
MEWSWVFLFFLSVTTGVHSEVQLVQSGAEVKKPGSSVKVSCKASGYTITDSNIHWVRQAPGQSLEWIGYIYPYN
GGTDYNQKFKNRATLTVDNPTNTAYMELSSLRSEDTDFYYCVNGNPWLAYWGQGTLVTVSSASTKGP(SEQ
ID NO: 33)
CDRL1 of hP67.6 binding domain: QSPSTLSASV (SEQ ID NO: 34)
CDRL2 of hP67.6 binding domain DNYGIRFLTWFQQKPG (SEQ ID NO: 35)
CDRL3 of hP67.6 binding domain: FTLTISSL (SEQ ID NO: 36).
CDRH1 of hP67.6 binding domain: VQSGAEVKKPG (SEQ ID NO: 37)
CDRH2 of hP67.6 binding domain: DSNIHWV (SEQ ID NO: 38)
CDRH3 of hP67.6 binding domain: LTVDNPTNT (SEQ ID NO: 39)
CDRL1 of h2H12EC binding domain: NYDIN (SEQ ID NO: 40)
CDRL2 of h2H12EC binding domain: WIYPGDGSTKYNEKFKA (SEQ ID NO: 41)
CDRL3 of h2H12EC binding domain: GYEDAMDY (SEQ ID NO: 42)
CDRH1 of h2H12EC binding domain: KASQDINSYLS (SEQ ID NO: 43)
CDRH2 of h2H12EC binding domain: RANRLVD (SEQ ID NO: 44)
CDRH3 of h2H12EC binding domain: LQYDEFPLT (SEQ ID NO: 45)
Light chain of a representative anti-CD33 antibody:
NIMLTQSPSSLAVSAGEKVTMSCKSSQSVFFSSSQKNYLAWYQQIPGQSPKLLIYWASTRESGVPDRFTGSGSG
TDFTLTISSVQSEDLAIYYCHQYLSSRTFGGGTKLEIKR (SEQ ID NO: 46)
Heavy chain of representative anti-CD33 antibody:
QVQLQQPGAEVVKPGASVKMSCKASGYTFTSYYIHWIKQTPGQGLEWVGVIYPGNDDISYNQKFKGKATLTADK
SSTTAYMQLSSLTSEDSAVYYCAREVRLRYFDVWGAGTTVTVSS (SEQ ID NO: 47)
CDRL2 for CD33 binding domain: VIYPGNDDISYNQKFXG (SEQ ID NO: 48) wherein X
is K or Q
CDRL3 for CD33 binding domain: EVRLRYFDV (SEQ ID NO: 49)
CDRH1 for CD33 binding domain: KSSQSVFFSSSQKNYLA (SEQ ID NO: 50)
CDRH2 for CD33 binding domain: WASTRES (SEQ ID NO: 51)
CDRH3 for CD33 binding domain: HQYLSSRT (SEQ ID NO: 52)
Gly-Ser Linkers:
(GGGGS)n (SEQ ID NO: 53)
(GGGS)n(GGGGS)n (SEQ ID NO: 54)
(GGGS)n(GGS)n (SEQ ID NO: 55)
(GGGS)n(GGGGS)₁ (SEQ ID NO: 56)
GGGGSGGGGSGGGGSGGGGS (SEQ ID NO: 57)
GGGGSGGGGSGGGGS (SEQ ID NO: 58)
GGGGSGGGGS (SEQ ID NO: 59)
GGGGS (SEQ ID NO: 60)
GGGSGGGS (SEQ ID NO: 61)
GGGS (SEQ ID NO: 62)
GGSGGGSGGSG (SEQ ID NO: 63)
GGSGGGSGSG (SEQ ID NO: 64)
GGSGGGSG (SEQ ID NO: 65)
Linker: (EAAAK)n (SEQ ID NO: 66) wherein n is an integer including 1, 2, 3,
4, 5, 6, 7, 8, 9, or more
CDRL1 of CD3 T-cell activating epitope binding domain: SASSSVSYMN (SEQ ID
NO: 67)
CDRL2 of CD3 T-cell activating epitope binding domain: RWIYDTSKLAS (SEQ ID
NO: 68)
CDRL3 of CD3 T-cell activating epitope binding domain: QQWSSNPFT (SEQ ID
NO: 69)
CDRH1 of CD3 T-cell activating epitope binding domain: KASGYTFTRYTMH (SEQ
ID NO: 70)
CDRH2 of CD3 T-cell activating epitope binding domain: INPSRGYTNYNQKFKD (SEQ
ID NO: 71)
CDRH3 of CD3 T-cell activating epitope binding domain: YYDDHYCLDY (SEQ ID
NO: 72)
OKT3 scFv:
QVQLQQSGAELARPGASVKMSCKASGYTFTRYTMHWVKQRPGQGLEWIGYINPSRGYTNYNQKFKDKATLTTDK
SSSTAYMQLSSLTSEDSAVYYCARYYDDHYCLDYWGQGTTLTVSSSGGGGSGGGGSGGGGSQIVLTQSPAIMSA
SPGEKVTMTCSASSSVSYMNWYQQKSGTSPKRWIYDTSKLASGVPAHFRGSGSGTSYSLTISGMEAEDAATYYC
QQWSSNPFTFGSGTKLEINR (SEQ ID NO: 73)
CDRL1 of 20G6-F3 antibody: QSLVHNNGNTY (SEQ ID NO: 74)
CDRL3 of 20G6-F3, 4E7-C9, or 4B4-D7 antibody: GQGTQYPFT (SEQ ID NO: 75)
CDRH1 of 20G6-F3 antibody: GFTFTKAW (SEQ ID NO: 76),
CDRH2 of 20G6-F3 antibody: IKDKSNSYAT (SEQ ID NO: 77)
CDRH3 of 20G6-F3 antibody: RGVYYALSPFDY (SEQ ID NO: 78)
CDRL1 of 4B4-D7 antibody: QSLVHDNGNTY (SEQ ID NO: 79)
Rat APOBEC1
MSSETGPVAVDPTLRRRIEPHEFEVFFDPRELRKETCLLYEINWGGRHSIWRHTSQNTNKHVEVNFIEKFTTER
YFCPNTRCSITWFLSWSPCGECSRAITEFLSRYPHVTLFIYIARLYHHADPRNRQGLRDLISSGVTIQIMTEQE
SGYCWRNFVNYSPSNEAHWPRYPHLWVRLYVLELYCIILGLPPCLNILRRKQPQLTFFTIALQSCHYQRLPPHI
LWATGLK (SEQ ID NO: 80)
CDRH1 of 4B4-D7 or 4E7-C9 antibody: GFTFSNAW (SEQ ID NO: 81)
CDRH2 of 4B4-D7 antibody: IKARSNNYAT (SEQ ID NO: 82)
CDRH3 of 4B4-D7 antibody: RGTYYASKPFDY (SEQ ID NO: 83)
CDRL1 of 4E7-C9 antibody: QSLEHNNGNTY (SEQ ID NO: 84)
Human APOBEC-1
MTSEKGPSTGDPTLRRRIEPWEFDVFYDPRELRKEACLLYEIKWGMSRKIWRSSGKNTTNHVEVNFIKKFTSER
DFHPSMSCSITWFLSWSPCWECSQAIREFLSRHPGVTLVIYVARLFWHMDQQNRQGLRDLVNSGVTIQIMRASE
YYHCWRNFVNYPPGDEAHWPQYPPLWMMLYALELHCIILSLPPCLKISRRWQNHLTFFRLHLQNCHYQTIPPHI
LLATGLIHPSVAWR (SEQ ID NO: 85)
Petromyzon marinus pmCDA1
MTDAEYVRIHEKLDIYTFKKQFFNNKKSVSHRCYVLFELKRRGERRACFWGYAVNKPQSGTERGIHAEIFSIRK
VEEYLRDNPGQFTINWYSSWSPCADCAEKILEWYNQELRGNGHTLKIWACKLYYEKNARNQIGLWNLRDNGVGL
NVMVSEHYQCCRKIFIQSSHNQLNENRWLEKTLKRAEKRRSELSIMIQVKILHTTKSPAV (SEQ ID NO:
86)
CDRH2 of 4E7-C9 antibody: IKDKSNNYAT (SEQ ID NO: 87)
CDRH3 of 4E7-C9 antibody: RYVHYGIGYAMDA (SEQ ID NO: 88)
CDRL1 of 18F5-H10 antibody: QSLVHTNGNTY (SEQ ID NO: 89)
CDRL3 of 18F5-H10 antibody: GQGTHYPFT (SEQ ID NO: 90)
CDRH1 of 18F5-H10 antibody: GFTFTNAW (SEQ ID NO: 91)
CDRH2 of 18F5-H10 antibody: KDKSNNYAT (SEQ ID NO: 92)
CDRH3 of 18F5-H10 antibody: RYVHYRFAYALDA (SEQ ID NO: 93)
Variable heavy chain of TGN1412:
QVQLVQSGAEVKKPGASVKVSCKASGYTFTSYYIHWVRQAPGQGLEWIGCIYPGNVNTNYNEKFKDRATLTVDT
SISTAYMELSRLRSDDTAVYFCTRSHYGLDWNFDVWGQGTTVTVSS (SEQ ID NO: 94)
Variable light chain of TGN1412:
DIQMTQSPSSLSASVGDRVTITCHASQNIYVWLNWYQQKPGKAPKLLIYKASNLHTGVPSRFSGSGSGTDFTLT
ISSLQPEDFATYYCQQGQTYPYTFGGGTKVEIK (SEQ ID NO: 95)
CDRL1 of CD28 binding domain: HASQNIYVWLN (SEQ ID NO: 96)
CDRL2 of CD28 binding domain: KASNLHT (SEQ ID NO: 97)
CDRL3 of CD28 binding domain: QQGQTYPYT (SEQ ID NO: 98)
CDRH1 of CD28 binding domain: GYTFTSYYIH (SEQ ID NO: 99)
CDRH2 of CD28 binding domain: CIYPGNVNTNYNEK (SEQ ID NO: 100)
CDRH3 of CD28 binding domain: SHYGLDWNFDV (SEQ ID NO: 101)
Human APOBEC-3G
MKPHFRNTVERMYRDTFSYNFYNRPILSRRNTVWLCYEVKTKGPSRPPLDAKIFRGQVYSELKYHPEMRFFHWF
SKWRKLHRDQEYEVTWYISWSPCTKCTRDMATFLAEDPKVTLTIFVARLYYFWDPDYQEALRSLCQKRDGPRAT
MKIMNYDEFQHCWSKFVYSQRELFEPWNNLPKYYILLHIMLGEILRHSMDPPTFTFNFNNEPWVRGRHETYLCY
EVERMHNDTWVLLNQRRGFLCNQAPHKHGFLEGRHAELCFLDVIPFWKLDLDQDYRVTCFTSWSPCFSCAQEMA
KFISKNKHVSLCIFTARIYDDQGRCQEGLRTLAEAGAKISIMTYSEFKHCWDTFVDHQGCPFQPWDGLDEHSQD
LSGRLRAILQNQEN (SEQ ID NO: 102)
Human APOBEC3G D316R_D317R APOBEC3G
MKPHFRNTVERMYRDTFSYNFYNRPILSRRNTVWLCYEVKTKGPSRPPLDAKIFRGQVYSELKYHPEMRFFHWF
SKWRKLHRDQEYEVTWYISWSPCTKCTRDMATFLAEDPKVTLTIFVARLYYFWDPDYQEALRSLCQKRDGPRAT
MKIMNYDEFQHCWSKFVYSQRELFEPWNNLPKYYILLHIMLGEILRHSMDPPTFTFNFNNEPWVRGRHETYLCY
EVERMHNDTWVLLNQRRGFLCNQAPHKHGFLEGRHAELCFLDVIPFWKLDLDQDYRVTCFTSWSPCFSCAQEMA
KFISKNKHVSLCIFTARIYRRQGRCQEGLRTLAEAGAKISIMTYSEFKHCWDTFVDHQGCPFQPWDGLDEHSQD
LSGRLRAILQNQEN (SEQ ID NO: 103)
Human APOBEC3G chain A
MDPPTETENENNEPWVRGRHETYLCYEVERMHNDTWVLLNQRRGFLCNQAPHKHGFLEGRHAELCFLDVIPEWK
LDLDQDYRVTCFTSWSPCFSCAQEMAKFISKNKHVSLCIFTARIYDDQGRCQEGLRTLAEAGAKISIMTYSEFK
HCWDTFVDHQGCPFQPWDGLDEHSQDLSGRLRAILQ (SEQ ID NO: 104)
CDRH1 of CD28 binding domain: SYYIH (SEQ ID NO: 105)
CDRH2 of CD2 8 binding domain: CIYPGNVNTNYNEKFKD (SEQ ID NO: 106)
Human APOBEC3G chain A D120R_D121R
MDPPTFTFNFNNEPWVRGRHETYLCYEVERMHNDTWVLLNQRRGFLCNQAPHKHGFLEGRHAELCFLDVIPFWK
LDLDQDYRVTCFTSWSPCFSCAQEMAKFISKNKHVSLCIFTARIYRRQGRCQEGLRTLAEAGAKISIMTYSEFK
HCWDTFVDHQGCPFQPWDGLDEHSQDLSGRLRAILQ (SEQ ID NO: 107)
CDRL1 of 4-1BB binding domain: RASQSVS (SEQ ID NO: 108)
CDRL2 of 4-1BB binding domain: ASNRAT (SEQ ID NO: 109)
CDRL3 of 4-1BB binding domain: QRSNWPPALT (SEQ ID NO: 110)
CDRH1 of 4-1BB binding domain: YYWS (SEQ ID NO: 111)
CDRH3 of 4-1BB binding domain: YGPGNYDWYFDL (SEQ ID NO: 112)
CDRL1 of 4-1BB binding domain: SGDNIGDQYAH (SEQ ID NO: 113)
CDRL2 of 4-1BB binding domain: QDKNRPS (SEQ ID NO: 114)
CDRL3 of 4-1BB binding domain: ATYTGFGSLAV (SEQ ID NO: 115)
CDRH1 of 4-1BB binding domain: GYSFSTYWIS (SEQ ID NO: 116)
CDRH2 of 4-1BB binding domain: KIYPGDSYTNYSPS (SEQ ID NO: 117)
CDRH3 of 4-1BB binding domain: GYGIFDY (SEQ ID NO: 118)
CDRL1 of OKT8 antibody: RTSRSISQYLA (SEQ ID NO: 119)
CDRL2 of OKT8 antibody: SGSTLQS (SEQ ID NO: 120)
CDRL3 of OKT8 antibody: QQHNENPLT (SEQ ID NO: 121)
CDRH1 of OKT8 antibody: GFNIKD (SEQ ID NO: 122)
CDRH2 of OKT8 antibody: RIDPANDNT (SEQ ID NO: 123)
CDRH3 of OKT8 antibody: GYGYYVFDH (SEQ ID NO: 124)
Variable light chain to KIR2DL1 and KIR2DL2/3 binding domain:
EIVLTQSPVTLSLSPGERATLSCRASQSVSSYLAWYQQKPGQAPRLLIYDASNRATGIPARFSGSGSGTDFTLT
ISSLEPEDFAVYYCQQRSNWMYTFGQGTKLEIKRT (SEQ ID NO: 125)
Variable heavy chain to KIR2DL1 and KIR2DL2/3 binding domain:
QVQLVQSGAEVKKPGSSVKVSCKASGGTFSFYAISWVRQAPGQGLEWMGGFIPIFGAANYAQKFQGRVTITADE
STSTAYMELSSLRSDDTAVYYCARIPSGSYYYDYDMDVWGQGTTVTVSS (SEQ ID NO: 126)
His Tag
HHHHHH (SEQ ID NO: 127)
Flag tag
DYKDDDDK (SEQ ID NO: 128)
Xpress tag
DLYDDDDK (SEQ ID NO: 129)
Avi tag
GLNDIFEAQKIEWHE (SEQ ID NO: 130)
Calmodulin tag
KRRWKKNFIAVSAANRFKKISSSGAL (SEQ ID NO: 131)
HA tag
YPYDVPDYA (SEQ ID NO: 132)
Myc tag
EQKLISEEDL (SEQ ID NO: 133)
Softag 1
SLAELLNAGLGGS (SEQ ID NO: 134)
Softag 3
TQDPSRVG (SEQ ID NO: 135)
V5 tag
GKPIPNPLLGLDST (SEQ ID NO: 136)
HBG-113 (ABE8e gRNA target): CUUGACCAAUAGCCUUGACA (SEQ ID NO: 137)
Each gRNA is chemically modified with the groups 2′-O-methyl analogs and 3′
phosphorothioate internucleotide linkages at the first three 5′
terminal RNA residues.
HBG-17 5 (ABE8e gRNA target): AGAUAUUUGCAUUGAGAUAG (SEQ ID NO: 138)
Optionally, each gRNA is chemically modified with the groups 2′-O-methyl
analogs and 3′ phosphorothioate internucleotide linkages at the first three
5′ and 3′ terminal RNA residues.
pCMV_BE4max
ATATGCCAAGTACGCCCCCTATTGACGTCAATGACGGTAAATGGCCCGCCTGGCATTATGCCCAGTACATGACC
TTATGGGACTTTCCTACTTGGCAGTACATCTACGTATTAGTCATCGCTATTACCATGGTGATGCGGTTTTGGCA
GTACATCAATGGGCGTGGATAGCGGTTTGACTCACGGGGATTTCCAAGTCTCCACCCCATTGACGTCAATGGGA
GTTTGTTTTGGCACCAAAATCAACGGGACTTTCCAAAATGTCGTAACAACTCCGCCCCATTGACGCAAATGGGC
GGTAGGCGTGTACGGTGGGAGGTCTATATAAGCAGAGCTGGTTTAGTGAACCGTCAGATCCGCTAGAGATCCGC
GGCCGCTAATACGACTCACTATAGGGAGAGCCGCCACCATGAAACGGACAGCCGACGGAAGCGAGTTCGAGTCA
CCAAAGAAGAAGCGGAAAGTCTCCTCAGAGACTGGGCCTGTCGCCGTCGATCCAACCCTGCGCCGCCGGATTGA
ACCTCACGAGTTTGAAGTGTTCTTTGACCCCCGGGAGCTGAGAAAGGAGACATGCCTGCTGTACGAGATCAACT
GGGGAGGCAGGCACTCCATCTGGAGGCACACCTCTCAGAACACAAATAAGCACGTGGAGGTGAACTTCATCGAG
AAGTTTACCACAGAGCGGTACTTCTGCCCCAATACCAGATGTAGCATCACATGGTTTCTGAGCTGGTCCCCTTG
CGGAGAGTGTAGCAGGGCCATCACCGAGTTCCTGTCCAGATATCCACACGTGACACTGTTTATCTACATCGCCA
GGCTGTATCACCACGCAGACCCAAGGAATAGGCAGGGCCTGCGCGATCTGATCAGCTCCGGCGTGACCATCCAG
ATCATGACAGAGCAGGAGTCCGGCTACTGCTGGCGGAACTTCGTGAATTATTCTCCTAGCAACGAGGCCCACTG
GCCTAGGTACCCACACCTGTGGGTGCGCCTGTACGTGCTGGAGCTGTATTGCATCATCCTGGGCCTGCCCCCTT
GTCTGAATATCCTGCGGAGAAAGCAGCCCCAGCTGACCTTCTTTACAATCGCCCTGCAGTCTTGTCACTATCAG
AGGCTGCCACCCCACATCCTGTGGGCCACAGGCCTGAAGTCTGGAGGATCTAGCGGAGGATCCTCTGGCAGCGA
GACACCAGGAACAAGCGAGTCAGCAACACCAGAGAGCAGTGGCGGCAGCAGCGGCGGCAGCGACAAGAAGTACA
GCATCGGCCTGGCCATCGGCACCAACTCTGTGGGCTGGGCCGTGATCACCGACGAGTACAAGGTGCCCAGCAAG
AAATTCAAGGTGCTGGGCAACACCGACCGGCACAGCATCAAGAAGAACCTGATCGGAGCCCTGCTGTTCGACAG
CGGCGAAACAGCCGAGGCCACCCGGCTGAAGAGAACCGCCAGAAGAAGATACACCAGACGGAAGAACCGGATCT
GCTATCTGCAAGAGATCTTCAGCAACGAGATGGCCAAGGTGGACGACAGCTTCTTCCACAGACTGGAAGAGTCC
TTCCTGGTGGAAGAGGATAAGAAGCACGAGCGGCACCCCATCTTCGGCAACATCGTGGACGAGGTGGCCTACCA
CGAGAAGTACCCCACCATCTACCACCTGAGAAAGAAACTGGTGGACAGCACCGACAAGGCCGACCTGCGGCTGA
TCTATCTGGCCCTGGCCCACATGATCAAGTTCCGGGGCCACTTCCTGATCGAGGGCGACCTGAACCCCGACAAC
AGCGACGTGGACAAGCTGTTCATCCAGCTGGTGCAGACCTACAACCAGCTGTTCGAGGAAAACCCCATCAACGC
CAGCGGCGTGGACGCCAAGGCCATCCTGTCTGCCAGACTGAGCAAGAGCAGACGGCTGGAAAATCTGATCGCCC
AGCTGCCCGGCGAGAAGAAGAATGGCCTGTTCGGAAACCTGATTGCCCTGAGCCTGGGCCTGACCCCCAACTTC
AAGAGCAACTTCGACCTGGCCGAGGATGCCAAACTGCAGCTGAGCAAGGACACCTACGACGACGACCTGGACAA
CCTGCTGGCCCAGATCGGCGACCAGTACGCCGACCTGTTTCTGGCCGCCAAGAACCTGTCCGACGCCATCCTGC
TGAGCGACATCCTGAGAGTGAACACCGAGATCACCAAGGCCCCCCTGAGCGCCTCTATGATCAAGAGATACGAC
GAGCACCACCAGGACCTGACCCTGCTGAAAGCTCTCGTGCGGCAGCAGCTGCCTGAGAAGTACAAAGAGATTTT
CTTCGACCAGAGCAAGAACGGCTACGCCGGCTACATTGACGGCGGAGCCAGCCAGGAAGAGTTCTACAAGTTCA
TCAAGCCCATCCTGGAAAAGATGGACGGCACCGAGGAACTGCTCGTGAAGCTGAACAGAGAGGACCTGCTGCGG
AAGCAGCGGACCTTCGACAACGGCAGCATCCCCCACCAGATCCACCTGGGAGAGCTGCACGCCATTCTGCGGCG
GCAGGAAGATTTTTACCCATTCCTGAAGGACAACCGGGAAAAGATCGAGAAGATCCTGACCTTCCGCATCCCCT
ACTACGTGGGCCCTCTGGCCAGGGGAAACAGCAGATTCGCCTGGATGACCAGAAAGAGCGAGGAAACCATCACC
CCCTGGAACTTCGAGGAAGTGGTGGACAAGGGCGCTTCCGCCCAGAGCTTCATCGAGCGGATGACCAACTTCGA
TAAGAACCTGCCCAACGAGAAGGTGCTGCCCAAGCACAGCCTGCTGTACGAGTACTTCACCGTGTATAACGAGC
TGACCAAAGTGAAATACGTGACCGAGGGAATGAGAAAGCCCGCCTTCCTGAGCGGCGAGCAGAAAAAGGCCATC
GTGGACCTGCTGTTCAAGACCAACCGGAAAGTGACCGTGAAGCAGCTGAAAGAGGACTACTTCAAGAAAATCGA
GTGCTTCGACTCCGTGGAAATCTCCGGCGTGGAAGATCGGTTCAACGCCTCCCTGGGCACATACCACGATCTGC
TGAAAATTATCAAGGACAAGGACTTCCTGGACAATGAGGAAAACGAGGACATTCTGGAAGATATCGTGCTGACC
CTGACACTGTTTGAGGACAGAGAGATGATCGAGGAACGGCTGAAAACCTATGCCCACCTGTTCGACGACAAAGT
GATGAAGCAGCTGAAGCGGCGGAGATACACCGGCTGGGGCAGGCTGAGCCGGAAGCTGATCAACGGCATCCGGG
ACAAGCAGTCCGGCAAGACAATCCTGGATTTCCTGAAGTCCGACGGCTTCGCCAACAGAAACTTCATGCAGCTG
ATCCACGACGACAGCCTGACCTTTAAAGAGGACATCCAGAAAGCCCAGGTGTCCGGCCAGGGCGATAGCCTGCA
CGAGCACATTGCCAATCTGGCCGGCAGCCCCGCCATTAAGAAGGGCATCCTGCAGACAGTGAAGGTGGTGGACG
AGCTCGTGAAAGTGATGGGCCGGCACAAGCCCGAGAACATCGTGATCGAAATGGCCAGAGAGAACCAGACCACC
CAGAAGGGACAGAAGAACAGCCGCGAGAGAATGAAGCGGATCGAAGAGGGCATCAAAGAGCTGGGCAGCCAGAT
CCTGAAAGAACACCCCGTGGAAAACACCCAGCTGCAGAACGAGAAGCTGTACCTGTACTACCTGCAGAATGGGC
GGGATATGTACGTGGACCAGGAACTGGACATCAACCGGCTGTCCGACTACGATGTGGACCATATCGTGCCTCAG
AGCTTTCTGAAGGACGACTCCATCGACAACAAGGTGCTGACCAGAAGCGACAAGAACCGGGGCAAGAGCGACAA
CGTGCCCTCCGAAGAGGTCGTGAAGAAGATGAAGAACTACTGGCGGCAGCTGCTGAACGCCAAGCTGATTACCC
AGAGAAAGTTCGACAATCTGACCAAGGCCGAGAGAGGCGGCCTGAGCGAACTGGATAAGGCCGGCTTCATCAAG
AGACAGCTGGTGGAAACCCGGCAGATCACAAAGCACGTGGCACAGATCCTGGACTCCCGGATGAACACTAAGTA
CGACGAGAATGACAAGCTGATCCGGGAAGTGAAAGTGATCACCCTGAAGTCCAAGCTGGTGTCCGATTTCCGGA
AGGATTTCCAGTTTTACAAAGTGCGCGAGATCAACAACTACCACCACGCCCACGACGCCTACCTGAACGCCGTC
GTGGGAACCGCCCTGATCAAAAAGTACCCTAAGCTGGAAAGCGAGTTCGTGTACGGCGACTACAAGGTGTACGA
CGTGCGGAAGATGATCGCCAAGAGCGAGCAGGAAATCGGCAAGGCTACCGCCAAGTACTTCTTCTACAGCAACA
TCATGAACTTTTTCAAGACCGAGATTACCCTGGCCAACGGCGAGATCCGGAAGCGGCCTCTGATCGAGACAAAC
GGCGAAACCGGGGAGATCGTGTGGGATAAGGGCCGGGATTTTGCCACCGTGCGGAAAGTGCTGAGCATGCCCCA
AGTGAATATCGTGAAAAAGACCGAGGTGCAGACAGGCGGCTTCAGCAAAGAGTCTATCCTGCCCAAGAGGAACA
GCGATAAGCTGATCGCCAGAAAGAAGGACTGGGACCCTAAGAAGTACGGCGGCTTCGACAGCCCCACCGTGGCC
TATTCTGTGCTGGTGGTGGCCAAAGTGGAAAAGGGCAAGTCCAAGAAACTGAAGAGTGTGAAAGAGCTGCTGGG
GATCACCATCATGGAAAGAAGCAGCTTCGAGAAGAATCCCATCGACTTTCTGGAAGCCAAGGGCTACAAAGAAG
TGAAAAAGGACCTGATCATCAAGCTGCCTAAGTACTCCCTGTTCGAGCTGGAAAACGGCCGGAAGAGAATGCTG
GCCTCTGCCGGCGAACTGCAGAAGGGAAACGAACTGGCCCTGCCCTCCAAATATGTGAACTTCCTGTACCTGGC
CAGCCACTATGAGAAGCTGAAGGGCTCCCCCGAGGATAATGAGCAGAAACAGCTGTTTGTGGAACAGCACAAGC
ACTACCTGGACGAGATCATCGAGCAGATCAGCGAGTTCTCCAAGAGAGTGATCCTGGCCGACGCTAATCTGGAC
AAAGTGCTGTCCGCCTACAACAAGCACCGGGATAAGCCCATCAGAGAGCAGGCCGAGAATATCATCCACCTGTT
TACCCTGACCAATCTGGGAGCCCCTGCCGCCTTCAAGTACTTTGACACCACCATCGACCGGAAGAGGTACACCA
GCACCAAAGAGGTGCTGGACGCCACCCTGATCCACCAGAGCATCACCGGCCTGTACGAGACACGGATCGACCTG
TCTCAGCTGGGAGGTGACAGCGGCGGGAGCGGCGGGAGCGGGGGGAGCACTAATCTGAGCGACATCATTGAGAA
GGAGACTGGGAAACAGCTGGTCATTCAGGAGTCCATCCTGATGCTGCCTGAGGAGGTGGAGGAAGTGATCGGCA
ACAAGCCAGAGTCTGACATCCTGGTGCACACCGCCTACGACGAGTCCACAGATGAGAATGTGATGCTGCTGACC
TCTGACGCCCCCGAGTATAAGCCTTGGGCCCTGGTCATCCAGGATTCTAACGGCGAGAATAAGATCAAGATGCT
GAGCGGAGGATCCGGAGGATCTGGAGGCAGCACCAACCTGTCTGACATCATCGAGAAGGAGACAGGCAAGCAGC
TGGTCATCCAGGAGAGCATCCTGATGCTGCCCGAAGAAGTCGAAGAAGTGATCGGAAACAAGCCTGAGAGCGAT
ATCCTGGTCCATACCGCCTACGACGAGAGTACCGACGAAAATGTGATGCTGCTGACATCCGACGCCCCAGAGTA
TAAGCCCTGGGCTCTGGTCATCCAGGATTCCAACGGAGAGAACAAAATCAAAATGCTGTCTGGCGGCTCAAAAA
GAACCGCCGACGGCAGCGAATTCGAGCCCAAGAAGAAGAGGAAAGTCTAACCGGTCATCATCACCATCACCATT
GAGTTTAAACCCGCTGATCAGCCTCGACTGTGCCTTCTAGTTGCCAGCCATCTGTTGTTTGCCCCTCCCCCGTG
CCTTCCTTGACCCTGGAAGGTGCCACTCCCACTGTCCTTTCCTAATAAAATGAGGAAATTGCATCGCATTGTCT
GAGTAGGTGTCATTCTATTCTGGGGGGTGGGGTGGGGCAGGACAGCAAGGGGGAGGATTGGGAAGACAATAGCA
GGCATGCTGGGGATGCGGTGGGCTCTATGGCTTCTGAGGCGGAAAGAACCAGCTGGGGCTCGATACCGTCGACC
TCTAGCTAGAGCTTGGCGTAATCATGGTCATAGCTGTTTCCTGTGTGAAATTGTTATCCGCTCACAATTCCACA
CAACATACGAGCCGGAAGCATAAAGTGTAAAGCCTAGGGTGCCTAATGAGTGAGCTAACTCACATTAATTGCGT
TGCGCTCACTGCCCGCTTTCCAGTCGGGAAACCTGTCGTGCCAGCTGCATTAATGAATCGGCCAACGCGCGGGG
AGAGGCGGTTTGCGTATTGGGCGCTCTTCCGCTTCCTCGCTCACTGACTCGCTGCGCTCGGTCGTTCGGCTGCG
GCGAGCGGTATCAGCTCACTCAAAGGCGGTAATACGGTTATCCACAGAATCAGGGGATAACGCAGGAAAGAACA
TGTGAGCAAAAGGCCAGCAAAAGGCCAGGAACCGTAAAAAGGCCGCGTTGCTGGCGTTTTTCCATAGGCTCCGC
CCCCCTGACGAGCATCACAAAAATCGACGCTCAAGTCAGAGGTGGCGAAACCCGACAGGACTATAAAGATACCA
GGCGTTTCCCCCTGGAAGCTCCCTCGTGCGCTCTCCTGTTCCGACCCTGCCGCTTACCGGATACCTGTCCGCCT
TTCTCCCTTCGGGAAGCGTGGCGCTTTCTCATAGCTCACGCTGTAGGTATCTCAGTTCGGTGTAGGTCGTTCGC
TCCAAGCTGGGCTGTGTGCACGAACCCCCCGTTCAGCCCGACCGCTGCGCCTTATCCGGTAACTATCGTCTTGA
GTCCAACCCGGTAAGACACGACTTATCGCCACTGGCAGCAGCCACTGGTAACAGGATTAGCAGAGCGAGGTATG
TAGGCGGTGCTACAGAGTTCTTGAAGTGGTGGCCTAACTACGGCTACACTAGAAGAACAGTATTTGGTATCTGC
GCTCTGCTGAAGCCAGTTACCTTCGGAAAAAGAGTTGGTAGCTCTTGATCCGGCAAACAAACCACCGCTGGTAG
CGGTGGTTTTTTTGTTTGCAAGCAGCAGATTACGCGCAGAAAAAAAGGATCTCAAGAAGATCCTTTGATCTTTT
CTACGGGGTCTGACACTCAGTGGAACGAAAACTCACGTTAAGGGATTTTGGTCATGAGATTATCAAAAAGGATC
TTCACCTAGATCCTTTTAAATTAAAAATGAAGTTTTAAATCAATCTAAAGTATATATGAGTAAACTTGGTCTGA
CAGTTACCAATGCTTAATCAGTGAGGCACCTATCTCAGCGATCTGTCTATTTCGTTCATCCATAGTTGCCTGAC
TCCCCGTCGTGTAGATAACTACGATACGGGAGGGCTTACCATCTGGCCCCAGTGCTGCAATGATACCGCGAGAC
CCACGCTCACCGGCTCCAGATTTATCAGCAATAAACCAGCCAGCCGGAAGGGCCGAGCGCAGAAGTGGTCCTGC
AACTTTATCCGCCTCCATCCAGTCTATTAATTGTTGCCGGGAAGCTAGAGTAAGTAGTTCGCCAGTTAATAGTT
TGCGCAACGTTGTTGCCATTGCTACAGGCATCGTGGTGTCACGCTCGTCGTTTGGTATGGCTTCATTCAGCTCC
GGTTCCCAACGATCAAGGCGAGTTACATGATCCCCCATGTTGTGCAAAAAAGCGGTTAGCTCCTTCGGTCCTCC
GATCGTTGTCAGAAGTAAGTTGGCCGCAGTGTTATCACTCATGGTTATGGCAGCACTGCATAATTCTCTTACTG
TCATGCCATCCGTAAGATGCTTTTCTGTGACTGGTGAGTACTCAACCAAGTCATTCTGAGAATAGTGTATGCGG
CGACCGAGTTGCTCTTGCCCGGCGTCAATACGGGATAATACCGCGCCACATAGCAGAACTTTAAAAGTGCTCAT
CATTGGAAAACGTTCTTCGGGGCGAAAACTCTCAAGGATCTTACCGCTGTTGAGATCCAGTTCGATGTAACCCA
CTCGTGCACCCAACTGATCTTCAGCATCTTTTACTTTCACCAGCGTTTCTGGGTGAGCAAAAACAGGAAGGCAA
AATGCCGCAAAAAAGGGAATAAGGGCGACACGGAAATGTTGAATACTCATACTCTTCCTTTTTCAATATTATTG
AAGCATTTATCAGGGTTATTGTCTCATGAGCGGATACATATTTGAATGTATTTAGAAAAATAAACAAATAGGGG
TTCCGCGCACATTTCCCCGAAAAGTGCCACCTGACGTCGACGGATCGGGAGATCGATCTCCCGATCCCCTAGGG
TCGACTCTCAGTACAATCTGCTCTGATGCCGCATAGTTAAGCCAGTATCTGCTCCCTGCTTGTGTGTTGGAGGT
CGCTGAGTAGTGCGCGAGCAAAATTTAAGCTACAACAAGGCAAGGCTTGACCGACAATTGCATGAAGAATCTGC
TTAGGGTTAGGCGTTTTGCGCTGCTTCGCGATGTACGGGCCAGATATACGCGTTGACATTGATTATTGACTAGT
TATTAATAGTAATCAATTACGGGGTCATTAGTTCATAGCCCATATATGGAGTTCCGCGTTACATAACTTACGGT
AAATGGCCCGCCTGGCTGACCGCCCAACGACCCCCGCCCATTGACGTCAATAATGACGTATGTTCCCATAGTAA
CGCCAATAGGGACTTTCCATTGACGTCAATGGGTGGAGTATTTACGGTAAACTGCCCACTTGGCAGTACATCAA
GTGTATC (SEQ ID NO: 139)
>Homo sapiens FancA cds
ATGTCCGACTCGTGGGTCCCGAACTCCGCCTCGGGCCAGGACCCAGGGGGCCGCCGGAGGGCCTGGGCCGAGCT
GCTGGCGGGAAGGGTCAAGAGGGAAAAATATAATCCTGAAAGGGCACAGAAATTAAAGGAATCAGCTGTGCGCC
TCCTGCGAAGCCATCAGGACCTGAATGCCCTTTTGCTTGAGGTAGAAGGTCCACTGTGTAAAAAATTGTCTCTC
AGCAAAGTGATTGACTGTGACAGTTCTGAGGCCTATGCTAATCATTCTAGTTCATTTATAGGCTCTGCTTTGCA
GGATCAAGCCTCAAGGCTGGGGGTTCCCGTGGGTATTCTCTCAGCCGGGATGGTTGCCTCTAGCGTGGGACAGA
TCTGCACGGCTCCAGCGGAGACCAGTCACCCTGTGCTGCTGACTGTGGAGCAGAGAAAGAAGCTGTCTTCCCTG
TTAGAGTTTGCTCAGTATTTATTGGCACACAGTATGTTCTCCCGTCTTTCCTTCTGTCAAGAATTATGGAAAAT
ACAGAGTTCTTTGTTGCTTGAAGCGGTGTGGCATCTTCACGTACAAGGCATTGTGAGCCTGCAAGAGCTGCTGG
AAAGCCATCCCGACATGCATGCTGTGGGATCGTGGCTCTTCAGGAATCTGTGCTGCCTTTGTGAACAGATGGAA
GCATCCTGCCAGCATGCTGACGTCGCCAGGGCCATGCTTTCTGATTTTGTTCAAATGTTTGTTTTGAGGGGATT
TCAGAAAAACTCAGATCTGAGAAGAACTGTGGAGCCTGAAAAAATGCCGCAGGTCACGGTTGATGTACTGCAGA
GAATGCTGATTTTTGCACTTGACGCTTTGGCTGCTGGAGTACAGGAGGAGTCCTCCACTCACAAGATCGTGAGG
TGCTGGTTCGGAGTGTTCAGTGGACACACGCTTGGCAGTGTAATTTCCACAGATCCTCTGAAGAGGTTCTTCAG
TCATACCCTGACTCAGATACTCACTCACAGCCCTGTGCTGAAAGCATCTGATGCTGTTCAGATGCAGAGAGAGT
GGAGCTTTGCGCGGACACACCCTCTGCTCACCTCACTGTACCGCAGGCTCTTTGTGATGCTGAGTGCAGAGGAG
TTGGTTGGCCATTTGCAAGAAGTTCTGGAAACGCAGGAGGTTCACTGGCAGAGAGTGCTCTCCTTTGTGTCTGC
CCTGGTTGTCTGCTTTCCAGAAGCGCAGCAGCTGCTTGAAGACTGGGTGGCGCGTTTGATGGCCCAGGCATTCG
AGAGCTGCCAGCTGGACAGCATGGTCACTGCGTTCCTGGTTGTGCGCCAGGCAGCACTGGAGGGCCCCTCTGCG
TTCCTGTCATATGCAGACTGGTTCAAGGCCTCCTTTGGGAGCACACGAGGCTACCATGGCTGCAGCAAGAAGGC
CCTGGTCTTCCTGTTTACGTTCTTGTCAGAACTCGTGCCTTTTGAGTCTCCCCGGTACCTGCAGGTGCACATTC
TCCACCCACCCCTGGTTCCCAGCAAGTACCGCTCCCTCCTCACAGACTACATCTCATTGGCCAAGACACGGCTG
GCCGACCTCAAGGTTTCTATAGAAAACATGGGACTCTACGAGGATTTGTCATCAGCTGGGGACATTACTGAGCC
CCACAGCCAAGCTCTTCAGGATGTTGAAAAGGCCATCATGGTGTTTGAGCATACGGGGAACATCCCAGTCACCG
TCATGGAGGCCAGCATATTCAGGAGGCCTTACTACGTGTCCCACTTCCTCCCCGCCCTGCTCACACCTCGAGTG
CTCCCCAAAGTCCCTGACTCCCGTGTGGCGTTTATAGAGTCTCTGAAGAGAGCAGATAAAATCCCCCCATCTCT
GTACTCCACCTACTGCCAGGCCTGCTCTGCTGCTGAAGAGAAGCCAGAAGATGCAGCCCTGGGAGTGAGGGCAG
AACCCAACTCTGCTGAGGAGCCCCTGGGACAGCTCACAGCTGCACTGGGAGAGCTGAGAGCCTCCATGACAGAC
CCCAGCCAGCGTGATGTTATATCGGCACAGGTGGCAGTGATTTCTGAAAGACTGAGGGCTGTCCTGGGCCACAA
TGAGGATGACAGCAGCGTTGAGATATCAAAGATTCAGCTCAGCATCAACACGCCGAGACTGGAGCCACGGGAAC
ACATTGCTGTGGACCTCCTGCTGACGTCTTTCTGTCAGAACCTGATGGCTGCCTCCAGTGTCGCTCCCCCGGAG
AGGCAGGGTCCCTGGGCTGCCCTCTTCGTGAGGACCATGTGTGGACGTGTGCTCCCTGCAGTGCTCACCCGGCT
CTGCCAGCTGCTCCGTCACCAGGGCCCGAGCCTGAGTGCCCCACATGTGCTGGGGTTGGCTGCCCTGGCCGTGC
ACCTGGGTGAGTCCAGGTCTGCGCTCCCAGAGGTGGATGTGGGTCCTCCTGCACCTGGTGCTGGCCTTCCTGTC
CCTGCGCTCTTTGACAGCCTCCTGACCTGTAGGACGAGGGATTCCTTGTTCTTCTGCCTGAAATTTTGTACAGC
AGCAATTTCTTACTCTCTCTGCAAGTTTTCTTCCCAGTCACGAGATACTTTGTGCAGCTGCTTATCTCCAGGCC
TTATTAAAAAGTTTCAGTTCCTCATGTTCAGATTGTTCTCAGAGGCCCGACAGCCTCTTTCTGAGGAGGACGTA
GCCAGCCTTTCCTGGAGACCCTTGCACCTTCCTTCTGCAGACTGGCAGAGAGCTGCCCTCTCTCTCTGGACACA
CAGAACCTTCCGAGAGGTGTTGAAAGAGGAAGATGTTCACTTAACTTACCAAGACTGGTTACACCTGGAGCTGG
AAATTCAACCTGAAGCTGATGCTCTTTCAGATACTGAACGGCAGGACTTCCACCAGTGGGCGATCCATGAGCAC
TTTCTCCCTGAGTCCTCGGCTTCAGGGGGCTGTGACGGAGACCTGCAGGCTGCGTGTACCATTCTTGTCAACGC
ACTGATGGATTTCCACCAAAGCTCAAGGAGTTATGACCACTCAGAAAATTCTGATTTGGTCTTTGGTGGCCGCA
CAGGAAATGAGGATATTATTTCCAGATTGCAGGAGATGGTAGCTGACCTGGAGCTGCAGCAAGACCTCATAGTG
CCTCTCGGCCACACCCCTTCCCAGGAGCACTTCCTCTTTGAGATTTTCCGCAGACGGCTCCAGGCTCTGACAAG
CGGGTGGAGCGTGGCTGCCAGCCTTCAGAGACAGAGGGAGCTGCTAATGTACAAACGGATCCTCCTCCGCCTGC
CTTCGTCTGTCCTCTGCGGCAGCAGCTTCCAGGCAGAACAGCCCATCACTGCCAGATGCGAGCAGTTCTTCCAC
TTGGTCAACTCTGAGATGAGAAACTTCTGCTCCCACGGAGGTGCCCTGACACAGGACATCACTGCCCACTTCTT
CAGGGGCCTCCTGAACGCCTGTCTGCGGAGCAGAGACCCCTCCCTGATGGTCGACTTCATACTGGCCAAGTGCC
AGACGAAATGCCCCTTAATTTTGACCTCTGCTCTGGTGTGGTGGCCGAGCCTGGAGCCTGTGCTGCTCTGCCGG
TGGAGGAGACACTGCCAGAGCCCGCTGCCCCGGGAACTGCAGAAGCTACAAGAAGGCCGGCAGTTTGCCAGCGA
TTTCCTCTCCCCTGAGGCTGCCTCCCCAGCACCCAACCCGGACTGGCTCTCAGCTGCTGCACTGCACTTTGCGA
TTCAACAAGTCAGGGAAGAAAACATCAGGAAGCAGCTAAAGAAGCTGGACTGCGAGAGAGAGGAGCTATTGGTT
TTCCTTTTCTTCTTCTCCTTGATGGGCCTGCTGTCGTCACATCTGACCTCAAATAGCACCACAGACCTGCCAAA
GGCTTTCCACGTTTGTGCAGCAATCCTCGAGTGTTTAGAGAAGAGGAAGATATCCTGGCTGGCACTCTTTCAGT
TGACAGAGAGTGACCTCAGGCTGGGGCGGCTCCTCCTCCGTGTGGCCCCGGATCAGCACACCAGGCTGCTGCCT
TTCGCTTTTTACAGTCTTCTCTCCTACTTCCATGAAGACGCGGCCATCAGGGAAGAGGCCTTCCTGCATGTTGC
TGTGGACATGTACTTGAAGCTGGTCCAGCTCTTCGTGGCTGGGGATACAAGCACAGTTTCACCTCCAGCTGGCA
GGAGCCTGGAGCTCAAGGGTCAGGGCAACCCCGTGGAACTGATAACAAAAGCTCGTCTTTTTCTGCTGCAGTTA
ATACCTCGGTGCCCGAAAAAGAGCTTCTCACACGTGGCAGAGCTGCTGGCTGATCGTGGGGACTGCGACCCAGA
GGTGAGCGCCGCCCTCCAGAGCAGACAGCAGGCTGCCCCTGACGCTGACCTGTCCCAGGAGCCTCATCTCTTCT
GA (SEQ ID NO: 140)
>Homo sapiens FANCC cds (nucleotides 263-1939 of NCBI Reference Sequence
NM_000136.2)
ATGGCTCAAGATTCAGTAGATCTTTCTTGTGATTATCAGTTTTGGATGCAGAAGCTTTCTGTATGGGATCAGGC
TTCCACTTTGGAAACCCAGCAAGACACCTGTCTTCACGTGGCTCAGTTCCAGGAGTTCCTAAGGAAGATGTATG
AAGCCTTGAAAGAGATGGATTCTAATACAGTCATTGAAAGATTCCCCACAATTGGTCAACTGTTGGCAAAAGCT
TGTTGGAATCCTTTTATTTTAGCATATGATGAAAGCCAAAAAATTCTAATATGGTGCTTATGTTGTCTAATTAA
CAAAGAACCACAGAATTCTGGACAATCAAAACTTAACTCCTGGATACAGGGTGTATTATCTCATATACTTTCAG
CACTCAGATTTGATAAAGAAGTTGCTCTTTTCACTCAAGGTCTTGGGTATGCACCTATAGATTACTATCCTGGT
TTGCTTAAAAATATGGTTTTATCATTAGCGTCTGAACTCAGAGAGAATCATCTTAATGGATTTAACACTCAAAG
GCGAATGGCTCCCGAGCGAGTGGCGTCCCTGTCACGAGTTTGTGTCCCACTTATTACCCTGACAGATGTTGACC
CCCTGGTGGAGGCTCTCCTCATCTGTCATGGACGTGAACCTCAGGAAATCCTCCAGCCAGAGTTCTTTGAGGCT
GTAAACGAGGCCATTTTGCTGAAGAAGATTTCTCTCCCCATGTCAGCTGTAGTCTGCCTCTGGCTTCGGCACCT
TCCCAGCCTTGAAAAAGCAATGCTGCATCTTTTTGAAAAGCTAATCTCCAGTGAGAGAAATTGTCTGAGAAGGA
TCGAATGCTTTATAAAAGATTCATCGCTGCCTCAAGCAGCCTGCCACCCTGCCATATTCCGGGTTGTTGATGAG
ATGTTCAGGTGTGCACTCCTGGAAACCGATGGGGCCCTGGAAATCATAGCCACTATTCAGGTGTTTACGCAGTG
CTTTGTAGAAGCTCTGGAGAAAGCAAGCAAGCAGCTGCGGTTTGCACTCAAGACCTACTTTCCTTACACTTCTC
CATCTCTTGCCATGGTGCTGCTGCAAGACCCTCAAGATATCCCTCGGGGACACTGGCTCCAGACACTGAAGCAT
ATTTCTGAACTGCTCAGAGAAGCAGTTGAAGACCAGACTCATGGGTCCTGCGGAGGTCCCTTTGAGAGCTGGTT
CCTGTTCATTCACTTCGGAGGATGGGCTGAGATGGTGGCAGAGCAATTACTGATGTCGGCAGCCGAACCCCCCA
CGGCCCTGCTGTGGCTCTTGGCCTTCTACTACGGCCCCCGTGATGGGAGGCAGCAGAGAGCACAGACTATGGTC
CAGGTGAAGGCCGTGCTGGGCCACCTCCTGGCAATGTCCAGAAGCAGCAGCCTCTCAGCCCAGGACCTGCAGAC
GGTAGCAGGACAGGGCACAGACACAGACCTCAGAGCTCCTGCACAACAGCTGATCAGGCACCTTCTCCTCAACT
TCCTGCTCTGGGCTCCTGGAGGCCACACGATCGCCTGGGATGTCATCACCCTGATGGCTCACACTGCTGAGATA
ACTCACGAGATCATTGGCTTTCTTGACCAGACCTTGTACAGATGGAATCGTCTTGGCATTGAAAGCCCTAGATC
AGAAAAACTGGCCCGAGAGCTCCTTAAAGAGCTGCGAACTCAAGTCTAG (SEQ ID NO: 141)
>Homo sapiens FANCE cds (nucleotides 186-1796 of NCBI Reference Sequence
NM_021922.2)
ATGGCGACACCGGACGCGGGGCTCCCTGGGGCTGAGGGCGTGGAGCCGGCGCCCTGGGCGCAGCTGGAGGCCCC
CGCCCGCCTCCTGCTGCAGGCGCTGCAGGCGGGGCCTGAGGGGGCGCGGCGCGGCCTGGGGGTGCTCCGGGCGC
TGGGCAGCCGCGGCTGGGAGCCCTTCGACTGGGGTCGCTTGCTCGAGGCCCTGTGCCGGGAGGAGCCGGTCGTG
CAGGGGCCTGACGGCCGTCTGGAGCTGAAACCACTGTTGCTGCGATTGCCCCGGATATGCCAGAGGAACCTGAT
GTCCCTGCTGATGGCCGTTCGGCCATCGCTGCCGGAAAGTGGGCTCCTCTCTGTGCTGCAGATTGCCCAGCAGG
ACCTAGCCCCTGACCCAGATGCCTGGCTCCGTGCCCTGGGGGAATTGCTGCGAAGGGATTTGGGGGTGGGGACC
TCCATGGAGGGAGCTTCTCCACTGTCTGAAAGATGCCAGAGACAGCTCCAAAGTCTATGTAGGGGGCTGGGCCT
GGGGGGCAGGAGGTTGAAATCCCCCCAGGCTCCAGACCCTGAAGAAGAGGAGAACAGGGACTCCCAGCAGCCTG
GGAAACGCAGAAAGGACTCAGAGGAAGAGGCTGCCAGTCCTGAGGGGAAGAGGGTCCCCAAAAGATTACGGTGT
TGGGAAGAGGAAGAAGATCATGAGAAGGAGAGACCCGAACATAAGTCACTGGAATCCCTGGCAGATGGAGGAAG
TGCATCTCCTATTAAGGACCAGCCTGTCATGGCAGTTAAGACTGGCGAGGACGGTTCGAATCTGGATGATGCTA
AAGGTCTGGCTGAGAGTTTGGAGTTGCCCAAAGCTATCCAGGACCAGCTTCCCAGGCTGCAGCAGCTGCTGAAG
ACCTTGGAGGAGGGGTTAGAGGGATTGGAGGATGCCCCCCCAGTTGAGCTACAGCTTCTTCACGAATGTAGTCC
CAGCCAGATGGACTTGCTGTGTGCCCAGCTGCAGCTCCCTCAGCTCTCAGACCTCGGTCTCCTGCGGCTCTGCA
CCTGGCTGCTGGCCCTTTCACCTGATCTCAGCCTCAGCAATGCTACTGTGCTGACCAGAAGCCTCTTTCTTGGA
CGGATCCTCTCCTTGACTTCCTCAGCCTCCCGCCTGCTTACAACTGCCCTGACCTCCTTCTGTGCCAAATATAC
ATACCCTGTCTGCAGCGCCCTCCTTGACCCTGTGCTCCAGGCCCCAGGCACAGGTCCTGCTCAAACAGAGTTAC
TGTGTTGCCTTGTGAAGATGGAGTCCCTGGAGCCAGATGCACAGGTTCTAATGCTGGGACAGATCTTGGAGCTG
CCCTGGAAGGAGGAAACTTTCTTGGTGTTGCAGTCACTCCTAGAGCGGCAGGTGGAGATGACCCCTGAGAAGTT
CAGTGTCTTAATGGAGAAGCTCTGTAAAAAGGGGCTGGCAGCCACCACCTCCATGGCCTATGCCAAGCTCATGC
TGACAGTGATGACCAAGTATCAGGCTAACATCACTGAGACCCAGAGGCTGGGCCTGGCTATGGCCCTAGAACCT
AACACCACCTTCCTGAGGAAGTCCCTGAAGGCCGCCTTGAAACATTTGGGCCCCTGA (SEQ ID NO: 142)
>Homo sapiens FANCF cds (nucleotides 32-1156 of NCBI Reference Sequence
NM_022725.3)
ATGGAATCCCTTCTGCAGCACCTGGATCGCTTTTCCGAGCTTCTGGCGGTCTCAAGCACTACCTACGTCAGCAC
CTGGGACCCCGCCACCGTGCGCCGGGCCTTGCAGTGGGCGCGCTACCTGCGCCACATCCATCGGCGCTTTGGTC
GGCATGGCCCCATTCGCACGGCTCTGGAGCGGCGGCTGCACAACCAGTGGAGGCAAGAGGGCGGCTTTGGGCGG
GGTCCAGTTCCGGGATTAGCGAACTTCCAGGCCCTCGGTCACTGTGACGTCCTGCTCTCTCTGCGCCTGCTGGA
GAACCGGGCCCTCGGGGATGCAGCTCGTTACCACCTGGTGCAGCAACTCTTTCCCGGCCCGGGCGTCCGGGACG
CCGATGAGGAGACACTCCAAGAGAGCCTGGCCCGCCTTGCCCGCCGGCGGTCTGCGGTGCACATGCTGCGCTTC
AATGGCTATAGAGAGAACCCAAATCTCCAGGAGGACTCTCTGATGAAGACCCAGGCGGAGCTGCTGCTGGAGCG
TCTGCAGGAGGTGGGGAAGGCCGAAGCGGAGCGTCCCGCCAGGTTTCTCAGCAGCCTGTGGGAGCGCTTGCCTC
AGAACAACTTCCTGAAGGTGATAGCGGTGGCGCTGTTGCAGCCGCCTTTGTCTCGTCGGCCCCAAGAAGAGTTG
GAACCCGGCATCCACAAATCACCTGGAGAGGGGAGCCAAGTGCTAGTCCACTGGCTTCTGGGGAATTCGGAAGT
CTTTGCTGCCTTTTGTCGCGCCCTCCCAGCCGGGCTTTTGACTTTAGTGACTAGCCGCCACCCAGCGCTGTCTC
CTGTCTATCTGGGTCTGCTAACAGACTGGGGTCAACGTTTGCACTATGACCTTCAGAAAGGCATTTGGGTTGGA
ACTGAGTCCCAAGATGTGCCCTGGGAGGAGTTGCACAATAGGTTTCAAAGCCTCTGTCAGGCCCCTCCACCTCT
GAAAGATAAAGTTCTAACTGCCCTGGAGACCTGTAAAGCGCAGGATGGAGATTTTGAAGTACCTGGTCTTAGCA
TCTGGACAGACCTCTTATTAGCTCTTCGTAGTGGTGCATTTAGGAAAAGACAAGTTTTGGGTCTCAGCGCAGGC
CTCAGTTCTGTATAG (SEQ ID NO: 143)
>Homo sapiens FANCG cds (nucleotides 493-2361 of NCBI Reference Sequence
NM_004629.1)
ATGTCCCGCCAGACCACCTCTGTGGGCTCCAGCTGCCTGGACCTGTGGAGGGAAAAGAATGACCGGCTCGTTCG
ACAGGCCAAGGTGGCTCAGAACTCCGGTCTGACTCTGAGGCGACAGCAGTTGGCTCAGGATGCACTGGAAGGGC
TCAGAGGGCTCCTCCATAGTCTGCAAGGGCTCCCTGCAGCTGTTCCTGTTCTTCCCTTGGAGCTGACTGTCACC
TGCAACTTCATTATCCTGAGGGCAAGCTTGGCCCAGGGTTTCACAGAGGATCAGGCCCAGGATATCCAGCGGAG
CCTAGAGAGAGTGCTGGAGACACAGGAGCAGCAGGGGCCCAGGTTGGAACAGGGGCTCAGGGAGCTGTGGGACT
CTGTCCTTCGTGCTTCCTGCCTTCTGCCGGAGCTGCTGTCTGCCCTGCACCGCCTGGTTGGCCTGCAGGCTGCC
CTCTGGTTGAGTGCTGACCGTCTTGGGGACCTGGCCTTGTTACTAGAGACCCTGAATGGCAGCCAGAGTGGAGC
CTCTAAGGATCTGCTGTTACTTCTGAAAACTTGGAGTCCCCCAGCTGAGGAATTAGATGCTCCATTGACCCTGC
AGGATGCCCAGGGATTGAAGGATGTCCTCCTGACAGCATTTGCCTACCGCCAAGGTCTCCAGGAGCTGATCACA
GGGAACCCAGACAAGGCACTAAGCAGCCTTCATGAAGCGGCCTCAGGCCTGTGTCCACGGCCTGTGTTGGTCCA
GGTGTACACAGCACTGGGGTCCTGTCACCGTAAGATGGGAAATCCACAGAGAGCACTGTTGTACTTGGTTGCAG
CCCTGAAAGAGGGATCAGCCTGGGGTCCTCCACTTCTGGAGGCCTCTAGGCTCTATCAGCAACTGGGGGACACA
ACAGCAGAGCTGGAGAGTCTGGAGCTGCTAGTTGAGGCCTTGAATGTCCCATGCAGTTCCAAAGCCCCGCAGTT
TCTCATTGAGGTAGAATTACTACTGCCACCACCTGACCTAGCCTCACCCCTTCATTGTGGCACTCAGAGCCAGA
CCAAGCACATACTAGCAAGCAGGTGCCTACAGACGGGGAGGGCAGGAGACGCTGCAGAGCATTACTTGGACCTG
CTGGCCCTGTTGCTGGATAGCTCGGAGCCAAGGTTCTCCCCACCCCCCTCCCCTCCAGGGCCCTGTATGCCTGA
GGTGTTTTTGGAGGCAGCGGTAGCACTGATCCAGGCAGGCAGAGCCCAAGATGCCTTGACTCTATGTGAGGAGT
TGCTCAGCCGCACATCATCTCTGCTACCCAAGATGTCCCGGCTGTGGGAAGATGCCAGAAAAGGAACCAAGGAA
CTGCCATACTGCCCACTCTGGGTCTCTGCCACCCACCTGCTTCAGGGCCAGGCCTGGGTTCAACTGGGTGCCCA
AAAAGTGGCAATTAGTGAATTTAGCAGGTGCCTCGAGCTGCTCTTCCGGGCCACACCTGAGGAAAAAGAACAAG
GGGCAGCTTTCAACTGTGAGCAGGGATGTAAGTCAGATGCGGCACTGCAGCAGCTTCGGGCAGCCGCCCTAATT
AGTCGTGGACTGGAATGGGTAGCCAGCGGCCAGGATACCAAAGCCTTACAGGACTTCCTCCTCAGTGTGCAGAT
GTGCCCAGGTAATCGAGACACTTACTTTCACCTGCTTCAGACTCTGAAGAGGCTAGATCGGAGGGATGAGGCCA
CTGCACTCTGGTGGAGGCTGGAGGCCCAAACTAAGGGGTCACATGAAGATGCTCTGTGGTCTCTCCCCCTGTAC
CTAGAAAGCTATTTGAGCTGGATCCGTCCCTCTGATCGTGACGCCTTCCTTGAAGAATTTCGGACATCTCTGCC
AAAGTCTTGTGACCTGTAG (SEQ ID NO: 144)
>FancA protein
MSDSWVPNSASGQDPGGRRRAWAELLAGRVKREKYNPERAQKLKESAVRLLRSHQDLNALLLEVEGPLCKKLSL
SKVIDCDSSEAYANHSSSFIGSALQDQASRLGVPVGILSAGMVASSVGQICTAPAETSHPVLLTVEQRKKLSSL
LEFAQYLLAHSMFSRLSFCQELWKIQSSLLLEAVWHLHVQGIVSLQELLESHPDMHAVGSWLFRNLCCLCEQME
ASCQHADVARAMLSDFVQMFVLRGFQKNSDLRRTVEPEKMPQVTVDVLQRMLIFALDALAAGVQEESSTHKIVR
CWFGVFSGHTLGSVISTDPLKRFFSHTLTQILTHSPVLKASDAVQMQREWSFARTHPLLTSLYRRLFVMLSAEE
LVGHLQEVLETQEVHWQRVLSFVSALWCFPEAQQLLEDWVARLMAQAFESCQLDSMVTAFLVVRQAALEGPSA
FLSYADWFKASFGSTRGYHGCSKKALVFLFTFLSELVPFESPRYLQVHILHPPLVPSKYRSLLTDYISLAKTRL
ADLKVSIENMGLYEDLSSAGDITEPHSQALQDVEKAIMVFEHTGNIPVTVMEASIFRRPYYVSHFLPALLTPRV
LPKVPDSRVAFIESLKRADKIPPSLYSTYCQACSAAEEKPEDAALGVRAEPNSAEEPLGQLTAALGELRASMTD
PSQRDVISAQVAVISERLRAVLGHNEDDSSVEISKIQLSINTPRLEPREHIAVDLLLTSFCQNLMAASSVAPPE
RQGPWAALFVRTMCGRVLPAVLTRLCQLLRHQGPSLSAPHVLGLAALAVHLGESRSALPEVDVGPPAPGAGLPV
PALFDSLLTCRTRDSLFFCLKFCTAAISYSLCKFSSQSRDTLCSCLSPGLIKKFQFLMFRLFSEARQPLSEEDV
ASLSWRPLHLPSADWQRAALSLWTHRTFREVLKEEDVHLTYQDWLHLELEIQPEADALSDTERQDFHQWAIHEH
FLPESSASGGCDGDLQAACTILVNALMDFHQSSRSYDHSENSDLVFGGRTGNEDIISRLQEMVADLELQQDLIV
PLGHTPSQEHFLFEIFRRRLQALTSGWSVAASLQRQRELLMYKRILLRLPSSVLCGSSFQAEQPITARCEQFFH
LVNSEMRNFCSHGGALTQDITAHFFRGLLNACLRSRDPSLMVDFILAKCQTKCPLILTSALVWWPSLEPVLLCR
WRRHCQSPLPRELQKLQEGRQFASDFLSPEAASPAPNPDWLSAAALHFAIQQVREENIRKQLKKLDCEREELLV
FLFFFSLMGLLSSHLTSNSTTDLPKAFHVCAAILECLEKRKISWLALFQLTESDLRLGRLLLRVAPDQHTRLLP
FAFYSLLSYFHEDAAIREEAFLHVAVDMYLKLVQLFVAGDTSTVSPPAGRSLELKGQGNPVELITKARLFLLQL
IPRCPKKSFSHVAELLADRGDCDPEVSAALQSRQQAAPDADLSQEPHLF (SEQ ID NO: 145)
>Homo sapiens FANCC (UniProt Accession Q00597)
MAQDSVDLSCDYQFWMQKLSVWDQASTLETQQDTCLHVAQFQEFLRKMYEALKEMDSNTVIERFPTIGQLLAKA
CWNPFILAYDESQKILIWCLCCLINKEPQNSGQSKLNSWIQGVLSHILSALRFDKEVALFTQGLGYAPIDYYPG
LLKNMVLSLASELRENHLNGFNTQRRMAPERVASLSRVCVPLITLTDVDPLVEALLICHGREPQEILQPEFFEA
VNEAILLKKISLPMSAVVCLWLRHLPSLEKAMLHLFEKLISSERNCLRRIECFIKDSSLPQAACHPAIFRVVDE
MFRCALLETDGALEIIATIQVFTQCFVEALEKASKQLRFALKTYFPYTSPSLAMVLLQDPQDIPRGHWLQTLKH
ISELLREAVEDQTHGSCGGPFESWFLFIHFGGWAEMVAEQLLMSAAEPPTALLWLLAFYYGPRDGRQQRAQTMV
QVKAVLGHLLAMSRSSSLSAQDLQTVAGQGTDTDLRAPAQQLIRHLLLNFLLWAPGGHTIAWDVITLMAHTAEI
THEIIGFLDQTLYRWNRLGIESPRSEKLARELLKELRTQV (SEQ ID NO: 146)
>Homo sapiens FANCE (UniProt Accession Q9HB96)
MATPDAGLPGAEGVEPAPWAQLEAPARLLLQALQAGPEGARRGLGVLRALGSRGWEPFDWGRLLEALCREEPVV
QGPDGRLELKPLLLRLPRICQRNLMSLLMAVRPSLPESGLLSVLQIAQQDLAPDPDAWLRALGELLRRDLGVGT
SMEGASPLSERCQRQLQSLCRGLGLGGRRLKSPQAPDPEEEENRDSQQPGKRRKDSEEEAASPEGKRVPKRLRC
WEEEEDHEKERPEHKSLESLADGGSASPIKDQPVMAVKTGEDGSNLDDAKGLAESLELPKAIQDQLPRLQQLLK
TLEEGLEGLEDAPPVELQLLHECSPSQMDLLCAQLQLPQLSDLGLLRLCTWLLALSPDLSLSNATVLTRSLFLG
RILSLTSSASRLLTTALTSFCAKYTYPVCSALLDPVLQAPGTGPAQTELLCCLVKMESLEPDAQVLMLGQILEL
PWKEETFLVLQSLLERQVEMTPEKFSVLMEKLCKKGLAATTSMAYAKLMLTVMTKYQANITETQRLGLAMALEP
NTTFLRKSLKAALKHLGP (SEQ ID NO: 147)
>Homo sapiens FANCF (UniProt Accession Q9NPI8)
MESLLQHLDRFSELLAVSSTTYVSTWDPATVRRALQWARYLRHIHRRFGRHGPIRTALERRLHNQWRQEGGFGR
GPVPGLANFQALGHCDVLLSLRLLENRALGDAARYHLVQQLFPGPGVRDADEETLQESLARLARRRSAVHMLRF
NGYRENPNLQEDSLMKTQAELLLERLQEVGKAEAERPARFLSSLWERLPQNNFLKVIAVALLQPPLSRRPQEEL
EPGIHKSPGEGSQVLVHWLLGNSEVFAAFCRALPAGLLTLVTSRHPALSPVYLGLLTDWGQRLHYDLQKGIWVG
TESQDVPWEELHNRFQSLCQAPPPLKDKVLTALETCKAQDGDFEVPGLSIWTDLLLALRSGAFRKRQVLGLSAG
LSSV (SEQ ID NO: 148)
>Homo sapiens FANCG (UniProt Accession I15287)
MSRQTTSVGSSCLDLWREKNDRLVRQAKVAQNSGLTLRRQQLAQDALEGLRGLLHSLQGLPAAVPVLPLELTVT
CNFIILRASLAQGFTEDQAQDIQRSLERVLETQEQQGPRLEQGLRELWDSVLRASCLLPELLSALHRLVGLQAA
LWLSADRLGDLALLLETLNGSQSGASKDLLLLLKTWSPPAEELDAPLTLQDAQGLKDVLLTAFAYRQGLQELIT
GNPDKALSSLHEAASGLCPRPVLVQVYTALGSCHRKMGNPQRALLYLVAALKEGSAWGPPLLEASRLYQQLGDT
TAELESLELLVEALNVPCSSKAPQFLIEVELLLPPPDLASPLHCGTQSQTKHILASRCLQTGRAGDAAEHYLDL
LALLLDSSEPRFSPPPSPPGPCMPEVFLEAAVALIQAGRAQDALTLCEELLSRTSSLLPKMSRLWEDARKGTKE
LPYCPLWVSATHLLQGQAWVQLGAQKVAISEFSRCLELLFRATPEEKEQGAAFNCEQGCKSDAALQQLRAAALI
SRGLEWVASGQDTKALQDFLLSVQMCPGNRDTYFHLLQTLKRLDRRDEATALWWRLEAQTKGSHEDALWSLPLY
LESYLSWIRPSDRDAFLEEFRTSLPKSCDL (SEQ ID NO: 149)
>codon optimized Human gammaC DNA
ATGCTGAAACCAAGCCTGCCCTTTACAAGCCTGCTGTTCCTGCAGCTGCCACTGCTGGGGGTCGGACTGAATAC
TACAATCCTGACACCAAACGGAAATGAGGACACCACAGCCGATTTCTTTCTGACTACCATGCCCACTGACAGTC
TGTCAGTGAGCACCCTGCCACTGCCCGAGGTCCAGTGCTTCGTGTTTAACGTCGAATATATGAACTGTACCTGG
AATAGCTCCTCTGAACCTCAGCCAACAAATCTGACTCTGCACTACTGGTATAAGAACTCTGACAATGATAAGGT
GCAGAAATGCTCACATTATCTGTTCAGCGAGGAAATCACCTCCGGCTGTCAGCTGCAGAAGAAAGAGATTCACC
TGTACCAGACATTTGTGGTCCAGCTGCAGGATCCCCGGGAACCTCGGAGACAGGCCACTCAGATGCTGAAGCTG
CAGAACCTGGTCATCCCATGGGCTCCCGAGAATCTGACCCTGCATAAACTGTCCGAGTCTCAGCTGGAACTGAA
CTGGAACAATAGGTTCCTGAATCACTGCCTGGAGCATCTGGTGCAGTACCGCACAGACTGGGATCACTCTTGGA
CTGAACAGAGTGTGGACTATCGACATAAGTTTAGTCTGCCTTCAGTGGATGGGCAGAAAAGGTACACATTCAGG
GTCCGCTCTCGGTTCAACCCACTGTGCGGAAGCGCCCAGCACTGGAGCGAGTGGTCCCACCCCATCCATTGGGG
GTCTAACACCAGCAAGGAGAATCCTTTCCTGTTTGCCCTGGAAGCTGTGGTCATTTCAGTGGGAAGCATGGGCC
TGATCATTAGCCTGCTGTGCGTGTACTTCTGGCTGGAGCGGACCATGCCTAGAATCCCAACACTGAAGAACCTG
GAGGACCTGGTGACAGAATATCACGGCAATTTTTCCGCTTGGTCTGGGGTCAGTAAAGGACTGGCAGAGAGCCT
GCAGCCCGATTACTCCGAGCGGCTGTGCCTGGTGTCCGAAATTCCCCCTAAAGGCGGGGCACTGGGAGAAGGCC
CTGGGGCCTCCCCCTGCAACCAGCACTCACCCTATTGGGCACCACCCTGTTACACCCTGAAACCCGAAACTTAA
(SEQ ID NO: 150)
>native Human gammaC DNA
ATGTTGAAGCCATCATTACCATTCACATCCCTCTTATTCCTGCAGCTGCCCCTGCTGGGAGTGGGGCTGAACAC
GACAATTCTGACGCCCAATGGGAATGAAGACACCACAGCTGATTTCTTCCTGACCACTATGCCCACTGACTCCC
TCAGCGTTTCCACTCTGCCCCTCCCAGAGGTTCAGTGTTTTGTGTTCAATGTCGAGTACATGAATTGCACTTGG
AACAGCAGCTCTGAGCCCCAGCCTACCAACCTCACTCTGCATTATTGGTACAAGAACTCGGATAATGATAAAGT
CCAGAAGTGCAGCCACTATCTATTCTCTGAAGAAATCACTTCTGGCTGTCAGTTGCAAAAAAAGGAGATCCACC
TCTACCAAACATTTGTTGTTCAGCTCCAGGACCCACGGGAACCCAGGAGACAGGCCACACAGATGCTAAAACTG
CAGAATCTGGTGATCCCCTGGGCTCCAGAGAACCTAACACTTCACAAACTGAGTGAATCCCAGCTAGAACTGAA
CTGGAACAACAGATTCTTGAACCACTGTTTGGAGCACTTGGTGCAGTACCGGACTGACTGGGACCACAGCTGGA
CTGAACAATCAGTGGATTATAGACATAAGTTCTCCTTGCCTAGTGTGGATGGGCAGAAACGCTACACGTTTCGT
GTTCGGAGCCGCTTTAACCCACTCTGTGGAAGTGCTCAGCATTGGAGTGAATGGAGCCACCCAATCCACTGGGG
GAGCAATACTTCAAAAGAGAATCCTTTCCTGTTTGCATTGGAAGCCGTGGTTATCTCTGTTGGCTCCATGGGAT
TGATTATCAGCCTTCTCTGTGTGTATTTCTGGCTGGAACGGACGATGCCCCGAATTCCCACCCTGAAGAACCTA
GAGGATCTTGTTACTGAATACCACGGGAACTTTTCGGCCTGGAGTGGTGTGTCTAAGGGACTGGCTGAGAGTCT
GCAGCCAGACTACAGTGAACGACTCTGCCTCGTCAGTGAGATTCCCCCAAAAGGAGGGGCCCTTGGGGAGGGGC
CTGGGGCCTCCCCATGCAACCAGCATAGCCCCTACTGGGCCCCCCCATGTTACACCCTAAAGCCTGAAACCTGA
(SEQ ID NO: 151)
native canine gammaC DNA
ATGTTGAAGCCACCATTGCCACTCAGATCCCTCTTATTCCTGCAGCTGTCTCTGCTGGGGGTGGGGCTGAACTC
CACGGTCCCCATGCCCAATGGGAATGAAGACATCACACCTGATTTCTTCCTGACCGCTACACCCTCCGAGACCC
TCAGTGTTTCCTCCCTGCCCCTCCCAGAGGTCCAGTGTTTTGTGTTCAATGTTGAGTACATGAATTGCACTTGG
AACAGCAGCTCTGAGCCCCGGCCCACCAACCTGACCCTGCACTACTGGTATAAGAACTCCAATGATGATAAAGT
CCAGGAGTGTGGCCACTACCTATTCTCTAGAGAGGTCACTGCTGGCTGTTGGTTGCAGAAGGAGGAGATCCATC
TCTACGAAACATTTGTTGTCCAGCTCCGGGACCCACGGGAACCCAGGAGGCAGTCCACACAGAAGCTAAAACTG
CAAAATCTGGTGATCCCCTGGGCTCCGGAGAACCTAACCCTTCACAACCTGAGCGAATCCCAGCTAGAACTGAG
CTGGAGCAACAGACACTTGGACCACTGTTTGGAGCATGTTGTGCAGTACCGGAGTGACTGGGACCGCAGCTGGA
CTGAACAGTCAGTGGACCACCGAAATAGCTTCTCTCTGCCTAGCGTGGATGGGCAGAAGTTCTACACGTTCCGT
GTCCGAAGCCGCTATAACCCACTCTGTGGAAGCGCTCAGCGTTGGAGTGAATGGAGCCACCCTATCCACTGGGG
GAGCAATACCTCCAAGGAGAATCCTTTGTTTGCATCGGAAGCTGTGCTTATCCCCCTTGGCTCCATGGGATTGA
TTATTAGCCTTATCTGTGTGTACTACTGGCTGGAACGGTCGATCCCCCGAATTCCTACCCTCAAGAACCTGGAG
GATCTGGTTACTGAATATCACGGGAATTTTTCGGCCTGGAGTGGAGTGTCTAAGGGACTGGCGGAGAGTCTGCA
GCCAGACTACAGTGAATGGCTCTGCCACGTCAGTGAGATTCCCCCAAAAGGAGGGGCTCCAGGGGAGGGTCCTG
GGGGCTCCCCCTGCAGCCAGCATAGCCCCTACTGGGCTCCCCCATGTTATACCCTGAAACCTGAAACTGGAGCC
CTGA (SEQ ID NO: 152)
>human gammaC AA
MLKPSLPFTSLLFLQLPLLGVGLNTTILTPNGNEDTTADFFLTTMPTDSLSVSTLPLPEVQCFVFNVEYMNCTW
NSSSEPQPTNLTLHYWYKNSDNDKVQKCSHYLFSEEITSGCQLQKKEIHLYQTFVVQLQDPREPRRQATOMLKL
QNLVIPWAPENLTLHKLSESQLELNWNNRFLNHCLEHLVQYRTDWDHSWTEQSVDYRHKFSLPSVDGQKRYTFR
VRSRFNPLCGSAQHWSEWSHPIHWGSNTSKENPFLFALEAVVISVGSMGLIISLLCVYFWLERTMPRIPTLKNL
EDLVTEYHGNFSAWSGVSKGLAESLQPDYSERLCLVSEIPPKGGALGEGPGASPCNQHSPYWAPPCYTLKPET
(SEQ ID NO: 153)
>native canine gammaC AA (91% conserved with human)
MLKPPLPLRSLLFLQLSLLGVGLNSTVPMPNGNEDITPDFFLTATPSETLSVSSLPLPEVQCFVFNVEYMNCTW
NSSSEPRPTNLTLHYWYKNSNDDKVQECGHYLFSREVTAGCWLQKEEIHLYETFVVQLRDPREPRRQSTQKLKL
QNLVIPWAPENLTLHNLSESQLELSWSNRHLDHCLEHVVQYRSDWDRSWTEQSVDHRNSFSLPSVDGQKFYTFR
VRSRYNPLCGSAQRWSEWSHPIHWGSNTSKENPLFASEAVLIPLGSMGLIISLICVYYWLERSIPRIPTLKNLE
DLVTEYHGNFSAWSGVSKGLAESLQPDYSEWLCHVSEIPPKGGAPGEGPGGSPCSQHSPYWAPPCYTLKPETGA
LIP (SEQ ID NO: 154)
>Homo sapiens JAK3 cds (nucleotides 101-3475 of NCBI Reference Sequence:
NM_000215.3)
ATGGCACCTCCAAGTGAAGAGACGCCCCTGATCCCTCAGCGTTCATGCAGCCTCTTGTCCACGGAGGCTGGTGC
CCTGCATGTGCTGCTGCCCGCTCGGGGCCCCGGGCCCCCCCAGCGCCTATCTTTCTCCTTTGGGGACCACTTGG
CTGAGGACCTGTGCGTGCAGGCTGCCAAGGCCAGCGGCATCCTGCCTGTGTACCACTCCCTCTTTGCTCTGGCC
ACGGAGGACCTGTCCTGCTGGTTCCCCCCGAGCCACATCTTCTCCGTGGAGGATGCCAGCACCCAAGTCCTGCT
GTACAGGATTCGCTTTTACTTCCCCAATTGGTTTGGGCTGGAGAAGTGCCACCGCTTCGGGCTACGCAAGGATT
TGGCCAGTGCTATCCTTGACCTGCCAGTCCTGGAGCACCTCTTTGCCCAGCACCGCAGTGACCTGGTGAGTGGG
CGCCTCCCCGTGGGCCTCAGTCTCAAGGAGCAGGGTGAGTGTCTCAGCCTGGCCGTGTTGGACCTGGCCCGGAT
GGCGCGAGAGCAGGCCCAGCGGCCGGGAGAGCTGCTGAAGACTGTCAGCTACAAGGCCTGCCTACCCCCAAGCC
TGCGCGACCTGATCCAGGGCCTGAGCTTCGTGACGCGGAGGCGTATTCGGAGGACGGTGCGCAGAGCCCTGCGC
CGCGTGGCCGCCTGCCAGGCAGACCGGCACTCGCTCATGGCCAAGTACATCATGGACCTGGAGCGGCTGGATCC
AGCCGGGGCCGCCGAGACCTTCCACGTGGGCCTCCCTGGGGCCCTTGGTGGCCACGACGGGCTGGGGCTGCTCC
GCGTGGCTGGTGACGGCGGCATCGCCTGGACCCAGGGAGAACAGGAGGTCCTCCAGCCCTTCTGCGACTTTCCA
GAAATCGTAGACATTAGCATCAAGCAGGCCCCGCGCGTTGGCCCGGCCGGAGAGCACCGCCTGGTCACTGTTAC
CAGGACAGACAACCAGATTTTAGAGGCCGAGTTCCCAGGGCTGCCCGAGGCTCTGTCGTTCGTGGCGCTCGTGG
ACGGCTACTTCCGGCTGACCACGGACTCCCAGCACTTCTTCTGCAAGGAGGTGGCACCGCCGAGGCTGCTGGAG
GAAGTGGCCGAGCAGTGCCACGGCCCCATCACTCTGGACTTTGCCATCAACAAGCTCAAGACTGGGGGCTCACG
TCCTGGCTCCTATGTTCTCCGCCGCAGCCCCCAGGACTTTGACAGCTTCCTCCTCACTGTCTGTGTCCAGAACC
CCCTTGGTCCTGATTATAAGGGCTGCCTCATCCGGCGCAGCCCCACAGGAACCTTCCTTCTGGTTGGCCTCAGC
CGACCCCACAGCAGTCTTCGAGAGCTCCTGGCAACCTGCTGGGATGGGGGGCTGCACGTAGATGGGGTGGCAGT
GACCCTCACTTCCTGCTGTATCCCCAGACCCAAAGAAAAGTCCAACCTGATCGTGGTCCAGAGAGGTCACAGCC
CACCCACATCATCCTTGGTTCAGCCCCAATCCCAATACCAGCTGAGTCAGATGACATTTCACAAGATCCCTGCT
GACAGCCTGGAGTGGCATGAGAACCTGGGCCATGGGTCCTTCACCAAGATTTACCGGGGCTGTCGCCATGAGGT
GGTGGATGGGGAGGCCCGAAAGACAGAGGTGCTGCTGAAGGTCATGGATGCCAAGCACAAGAACTGCATGGAGT
CATTCCTGGAAGCAGCGAGCTTGATGAGCCAAGTGTCGTACCGGCATCTCGTGCTGCTCCACGGCGTGTGCATG
GCTGGAGACAGCACCATGGTGCAGGAATTTGTACACCTGGGGGCCATAGACATGTATCTGCGAAAACGTGGCCA
CCTGGTGCCAGCCAGCTGGAAGCTGCAGGTGGTCAAACAGCTGGCCTACGCCCTCAACTATCTGGAGGACAAAG
GCCTGCCCCATGGCAATGTCTCTGCCCGGAAGGTGCTCCTGGCTCGGGAGGGGGCTGATGGGAGCCCGCCCTTC
ATCAAGCTGAGTGACCCTGGGGTCAGCCCCGCTGTGTTAAGCCTGGAGATGCTCACCGACAGGATCCCCTGGGT
GGCCCCCGAGTGTCTCCGGGAGGCGCAGACACTTAGCTTGGAAGCTGACAAGTGGGGCTTCGGCGCCACGGTCT
GGGAAGTGTTTAGTGGCGTCACCATGCCCATCAGTGCCCTGGATCCTGCTAAGAAACTCCAATTTTATGAGGAC
CGGCAGCAGCTGCCGGCCCCCAAGTGGACAGAGCTGGCCCTGCTGATTCAACAGTGCATGGCCTATGAGCCGGT
CCAGAGGCCCTCCTTCCGAGCCGTCATTCGTGACCTCAATAGCCTCATCTCTTCAGACTATGAGCTCCTCTCAG
ACCCCACACCTGGTGCCCTGGCACCTCGTGATGGGCTGTGGAATGGTGCCCAGCTCTATGCCTGCCAAGACCCC
ACGATCTTCGAGGAGAGACACCTCAAGTACATCTCACAGCTGGGCAAGGGCAACTTTGGCAGCGTGGAGCTGTG
CCGCTATGACCCGCTAGGCGACAATACAGGTGCCCTGGTGGCCGTGAAACAGCTGCAGCACAGCGGGCCAGACC
AGCAGAGGGACTTTCAGCGGGAGATTCAGATCCTCAAAGCACTGCACAGTGATTTCATTGTCAAGTATCGTGGT
GTCAGCTATGGCCCGGGCCGCCAGAGCCTGCGGCTGGTCATGGAGTACCTGCCCAGCGGCTGCTTGCGCGACTT
CCTGCAGCGGCACCGCGCGCGCCTCGATGCCAGCCGCCTCCTTCTCTATTCCTCGCAGATCTGCAAGGGCATGG
AGTACCTGGGCTCCCGCCGCTGCGTGCACCGCGACCTGGCCGCCCGAAACATCCTCGTGGAGAGCGAGGCACAC
GTCAAGATCGCTGACTTCGGCCTAGCTAAGCTGCTGCCGCTTGACAAAGACTACTACGTGGTCCGCGAGCCAGG
CCAGAGCCCCATTTTCTGGTATGCCCCCGAATCCCTCTCGGACAACATCTTCTCTCGCCAGTCAGACGTCTGGA
GCTTCGGGGTCGTCCTGTACGAGCTCTTCACCTACTGCGACAAAAGCTGCAGCCCCTCGGCCGAGTTCCTGCGG
ATGATGGGATGTGAGCGGGATGTCCCCGCCCTCTGCCGCCTCTTGGAACTGCTGGAGGAGGGCCAGAGGCTGCC
GGCGCCTCCTGCCTGCCCTGCTGAGGTTCACGAGCTCATGAAGCTGTGCTGGGCCCCTAGCCCACAGGACCGGC
CATCATTCAGCGCCCTGGGCCCCCAGCTGGACATGCTGTGGAGCGGAAGCCGGGGGTGTGAGACTCATGCCTTC
ACTGCTCACCCAGAGGGCAAACACCACTCCCTGTCCTTTTCATAG (SEQ ID NO: 155)
>Homo sapiens PNP cds (nucleotides 147-1016 of NCBI Reference Sequence:
NM_000270.3)
ATGGAGAACGGATACACCTATGAAGATTATAAGAACACTGCAGAATGGCTTCTGTCTCACACTAAGCACCGACC
TCAAGTTGCAATAATCTGTGGTTCTGGATTAGGAGGTCTGACTGATAAATTAACTCAGGCCCAGATCTTTGACT
ACGGTGAAATCCCCAACTTTCCCCGAAGTACAGTGCCAGGTCATGCTGGCCGACTGGTGTTTGGGTTCCTGAAT
GGCAGGGCCTGTGTGATGATGCAGGGCAGGTTCCACATGTATGAAGGGTACCCACTCTGGAAGGTGACATTCCC
AGTGAGGGTTTTCCACCTTCTGGGTGTGGACACCCTGGTAGTCACCAATGCAGCAGGAGGGCTGAACCCCAAGT
TTGAGGTTGGAGATATCATGCTGATCCGTGACCATATCAACCTACCTGGTTTCAGTGGTCAGAACCCTCTCAGA
GGGCCCAATGATGAAAGGTTTGGAGATCGTTTCCCTGCCATGTCTGATGCCTACGACCGGACTATGAGGCAGAG
GGCTCTCAGTACCTGGAAACAAATGGGGGAGCAACGTGAGCTACAGGAAGGCACCTATGTGATGGTGGCAGGCC
CCAGCTTTGAGACTGTGGCAGAATGTCGTGTGCTGCAGAAGCTGGGAGCAGACGCTGTTGGCATGAGTACAGTA
CCAGAAGTTATCGTTGCACGGCACTGTGGACTTCGAGTCTTTGGCTTCTCACTCATCACTAACAAGGTCATCAT
GGATTATGAAAGCCTGGAGAAGGCCAACCATGAAGAAGTCTTAGCAGCTGGCAAACAAGCTGCACAGAAATTGG
AACAGTTTGTCTCCATTCTTATGGCCAGCATTCCACTCCCTGACAAAGCCAGTTGA (SEQ ID NO: 156)
>Homo sapiens ADA cds (nucleotides 152-1243 of NCBI Reference Sequence:
NM_000022.3)
ATGGCCCAGACGCCCGCCTTCGACAAGCCCAAAGTAGAACTGCATGTCCACCTAGACGGATCCATCAAGCCTGA
AACCATCTTATACTATGGCAGGAGGAGAGGGATCGCCCTCCCAGCTAACACAGCAGAGGGGCTGCTGAACGTCA
TTGGCATGGACAAGCCGCTCACCCTTCCAGACTTCCTGGCCAAGTTTGACTACTACATGCCTGCTATCGCGGGC
TGCCGGGAGGCTATCAAAAGGATCGCCTATGAGTTTGTAGAGATGAAGGCCAAAGAGGGCGTGGTGTATGTGGA
GGTGCGGTACAGTCCGCACCTGCTGGCCAACTCCAAAGTGGAGCCAATCCCCTGGAACCAGGCTGAAGGGGACC
TCACCCCAGACGAGGTGGTGGCCCTAGTGGGCCAGGGCCTGCAGGAGGGGGAGCGAGACTTCGGGGTCAAGGCC
CGGTCCATCCTGTGCTGCATGCGCCACCAGCCCAACTGGTCCCCCAAGGTGGTGGAGCTGTGTAAGAAGTACCA
GCAGCAGACCGTGGTAGCCATTGACCTGGCTGGAGATGAGACCATCCCAGGAAGCAGCCTCTTGCCTGGACATG
TCCAGGCCTACCAGGAGGCTGTGAAGAGCGGCATTCACCGTACTGTCCACGCCGGGGAGGTGGGCTCGGCCGAA
GTAGTAAAAGAGGCTGTGGACATACTCAAGACAGAGCGGCTGGGACACGGCTACCACACCCTGGAAGACCAGGC
CCTTTATAACAGGCTGCGGCAGGAAAACATGCACTTCGAGATCTGCCCCTGGTCCAGCTACCTCACTGGTGCCT
GGAAGCCGGACACGGAGCATGCAGTCATTCGGCTCAAAAATGACCAGGCTAACTACTCGCTCAACACAGATGAC
CCGCTCATCTTCAAGTCCACCCTGGACACTGATTACCAGATGACCAAACGGGACATGGGCTTTACTGAAGAGGA
GTTTAAAAGGCTGAACATCAATGCGGCCAAATCTAGTTTCCTCCCAGAAGATGAAAAGAGGGAGCTTCTCGACC
TGCTCTATAAAGCCTATGGGATGCCACCTTCAGCCTCTGCAGGGCAGAACCTCTGA (SEQ ID NO: 157)
>Homo sapiens RAG1 cds (nucleotides 125-3256 of NCBI Reference Sequence:
NM_000448.2)
ATGGCAGCCTCTTTCCCACCCACCTTGGGACTCAGTTCTGCCCCAGATGAAATTCAGCACCCACATATTAAATT
TTCAGAATGGAAATTTAAGCTGTTCCGGGTGAGATCCTTTGAAAAGACACCTGAAGAAGCTCAAAAGGAAAAGA
AGGATTCCTTTGAGGGGAAACCCTCTCTGGAGCAATCTCCAGCAGTCCTGGACAAGGCTGATGGTCAGAAGCCA
GTCCCAACTCAGCCATTGTTAAAAGCCCACCCTAAGTTTTCAAAGAAATTTCACGACAACGAGAAAGCAAGAGG
CAAAGCGATCCATCAAGCCAACCTTCGACATCTCTGCCGCATCTGTGGGAATTCTTTTAGAGCTGATGAGCACA
ACAGGAGATATCCAGTCCATGGTCCTGTGGATGGTAAAACCCTAGGCCTTTTACGAAAGAAGGAAAAGAGAGCT
ACTTCCTGGCCGGACCTCATTGCCAAGGTTTTCCGGATCGATGTGAAGGCAGATGTTGACTCGATCCACCCCAC
TGAGTTCTGCCATAACTGCTGGAGCATCATGCACAGGAAGTTTAGCAGTGCCCCATGTGAGGTTTACTTCCCGA
GGAACGTGACCATGGAGTGGCACCCCCACACACCATCCTGTGACATCTGCAACACTGCCCGTCGGGGACTCAAG
AGGAAGAGTCTTCAGCCAAACTTGCAGCTCAGCAAAAAACTCAAAACTGTGCTTGACCAAGCAAGACAAGCCCG
TCAGCGCAAGAGAAGAGCTCAGGCAAGGATCAGCAGCAAGGATGTCATGAAGAAGATCGCCAACTGCAGTAAGA
TACATCTTAGTACCAAGCTCCTTGCAGTGGACTTCCCAGAGCACTTTGTGAAATCCATCTCCTGCCAGATCTGT
GAACACATTCTGGCTGACCCTGTGGAGACCAACTGTAAGCATGTCTTTTGCCGGGTCTGCATTCTCAGATGCCT
CAAAGTCATGGGCAGCTATTGTCCCTCTTGCCGATATCCATGCTTCCCTACTGACCTGGAGAGTCCAGTGAAGT
CCTTTCTGAGCGTCTTGAATTCCCTGATGGTGAAATGTCCAGCAAAAGAGTGCAATGAGGAGGTCAGTTTGGAA
AAATATAATCACCACATCTCAAGTCACAAGGAATCAAAAGAGATTTTTGTGCACATTAATAAAGGGGGCCGGCC
CCGCCAACATCTTCTGTCGCTGACTCGGAGAGCTCAGAAGCACCGGCTGAGGGAGCTCAAGCTGCAAGTCAAAG
CCTTTGCTGACAAAGAAGAAGGTGGAGATGTGAAGTCCGTGTGCATGACCTTGTTCCTGCTGGCTCTGAGGGCG
AGGAATGAGCACAGGCAAGCTGATGAGCTGGAGGCCATCATGCAGGGAAAGGGCTCTGGCCTGCAGCCAGCTGT
TTGCTTGGCCATCCGTGTCAACACCTTCCTCAGCTGCAGTCAGTACCACAAGATGTACAGGACTGTGAAAGCCA
TCACAGGGAGACAGATTTTTCAGCCTTTGCATGCCCTTCGGAATGCTGAGAAGGTACTTCTGCCAGGCTACCAC
CACTTTGAGTGGCAGCCACCTCTGAAGAATGTGTCTTCCAGCACTGATGTTGGCATTATTGATGGGCTGTCTGG
ACTATCATCCTCTGTGGATGATTACCCAGTGGACACCATTGCAAAGAGGTTCCGCTATGATTCAGCTTTGGTGT
CTGCTTTGATGGACATGGAAGAAGACATCTTGGAAGGCATGAGATCCCAAGACCTTGATGATTACCTGAATGGC
CCCTTCACTGTGGTGGTGAAGGAGTCTTGTGATGGAATGGGAGACGTGAGTGAGAAGCATGGGAGTGGGCCTGT
AGTTCCAGAAAAGGCAGTCCGTTTTTCATTCACAATCATGAAAATTACTATTGCCCACAGCTCTCAGAATGTGA
AAGTATTTGAAGAAGCCAAACCTAACTCTGAACTGTGTTGCAAGCCATTGTGCCTTATGCTGGCAGATGAGTCT
GACCACGAGACGCTGACTGCCATCCTGAGTCCTCTCATTGCTGAGAGGGAGGCCATGAAGAGCAGTGAATTAAT
GCTTGAGCTGGGAGGCATTCTCCGGACTTTCAAGTTCATCTTCAGGGGCACCGGCTATGATGAAAAACTTGTGC
GGGAAGTGGAAGGCCTCGAGGCTTCTGGCTCAGTCTACATTTGTACTCTTTGTGATGCCACCCGTCTGGAAGCC
TCTCAAAATCTTGTCTTCCACTCTATAACCAGAAGCCATGCTGAGAACCTGGAACGTTATGAGGTCTGGCGTTC
CAACCCTTACCATGAGTCTGTGGAAGAACTGCGGGATCGGGTGAAAGGGGTCTCAGCTAAACCTTTCATTGAGA
CAGTCCCTTCCATAGATGCACTCCACTGTGACATTGGCAATGCAGCTGAGTTCTACAAGATCTTCCAGCTAGAG
ATAGGGGAAGTGTATAAGAATCCCAATGCTTCCAAAGAGGAAAGGAAAAGGTGGCAGGCCACACTGGACAAGCA
TCTCCGGAAGAAGATGAACCTCAAACCAATCATGAGGATGAATGGCAACTTTGCCAGGAAGCTCATGACCAAAG
AGACTGTGGATGCAGTTTGTGAGTTAATTCCTTCCGAGGAGAGGCACGAGGCTCTGAGGGAGCTGATGGATCTT
TACCTGAAGATGAAACCAGTATGGCGATCATCATGCCCTGCTAAAGAGTGCCCAGAATCCCTCTGCCAGTACAG
TTTCAATTCACAGCGTTTTGCTGAGCTCCTTTCTACGAAGTTCAAGTATAGGTATGAGGGAAAAATCACCAATT
ATTTTCACAAAACCCTGGCCCATGTTCCTGAAATTATTGAGAGGGATGGCTCCATTGGGGCATGGGCAAGTGAG
GGAAATGAGTCTGGTAACAAACTGTTTAGGCGCTTCCGGAAAATGAATGCCAGGCAGTCCAAATGCTATGAGAT
GGAAGATGTCCTGAAACACCACTGGTTGTACACCTCCAAATACCTCCAGAAGTTTATGAATGCTCATAATGCAT
TAAAAACCTCTGGGTTTACCATGAACCCTCAGGCAAGCTTAGGGGACCCATTAGGCATAGAGGACTCTCTGGAA
AGCCAAGATTCAATGGAATTTTAA (SEQ ID NO: 158)
>Homo sapiens RAG2 cds (nucleotides 206-1789 of NCBI Reference Sequence:
NM_000536.3)
ATGTCTCTGCAGATGGTAACAGTCAGTAATAACATAGCCTTAATTCAGCCAGGCTTCTCACTGATGAATTTTGA
TGGACAAGTTTTCTTCTTTGGACAAAAAGGCTGGCCCAAAAGATCCTGCCCCACTGGAGTTTTCCATCTGGATG
TAAAGCATAACCATGTCAAACTGAAGCCTACAATTTTCTCTAAGGATTCCTGCTACCTCCCTCCTCTTCGCTAC
CCAGCCACTTGCACATTCAAAGGCAGCTTGGAGTCTGAAAAGCATCAATACATCATCCATGGAGGGAAAACACC
AAACAATGAGGTTTCAGATAAGATTTATGTCATGTCTATTGTTTGCAAGAACAACAAAAAGGTTACTTTTCGCT
GCACAGAGAAAGACTTGGTAGGAGATGTTCCTGAAGCCAGATATGGTCATTCCATTAATGTGGTGTACAGCCGA
GGGAAAAGTATGGGTGTTCTCTTTGGAGGACGCTCATACATGCCTTCTACCCACAGAACCACAGAAAAATGGAA
TAGTGTAGCTGACTGCCTGCCCTGTGTTTTCCTGGTGGATTTTGAATTTGGGTGTGCTACATCATACATTCTTC
CAGAACTTCAGGATGGGCTATCTTTTCATGTCTCTATTGCCAAAAATGACACCATCTATATTTTAGGAGGACAT
TCACTTGCCAATAATATCCGGCCTGCCAACCTGTACAGAATAAGGGTTGATCTTCCCCTGGGTAGCCCAGCTGT
GAATTGCACAGTCTTGCCAGGAGGAATCTCTGTCTCCAGTGCAATCCTGACTCAAACTAACAATGATGAATTTG
TTATTGTTGGTGGCTATCAGCTTGAAAATCAAAAAAGAATGATCTGCAACATCATCTCTTTAGAGGACAACAAG
ATAGAAATTCGTGAGATGGAGACCCCAGATTGGACCCCAGACATTAAGCACAGCAAGATATGGTTTGGAAGCAA
CATGGGAAATGGAACTGTTTTTCTTGGCATACCAGGAGACAATAAACAAGTTGTTTCAGAAGGATTCTATTTCT
ATATGTTGAAATGTGCTGAAGATGATACTAATGAAGAGCAGACAACATTCACAAACAGTCAAACATCAACAGAA
GATCCAGGGGATTCCACTCCCTTTGAAGACTCTGAAGAATTTTGTTTCAGTGCAGAAGCAAATAGTTTTGATGG
TGATGATGAATTTGACACCTATAATGAAGATGATGAAGAAGATGAGTCTGAGACAGGCTACTGGATTACATGCT
GCCCTACTTGTGATGTGGATATCAACACTTGGGTACCATTCTATTCAACTGAGCTCAACAAACCCGCCATGATC
TACTGCTCTCATGGGGATGGGCACTGGGTCCATGCTCAGTGCATGGATCTGGCAGAACGCACACTCATCCATCT
GTCAGCAGGAAGCAACAAGTATTACTGCAATGAGCATGTGGAGATAGCAAGAGCTCTACACACTCCCCAAAGAG
TCCTACCCTTAAAAAAGCCTCCAATGAAATCCCTCCGTAAAAAAGGTTCTGGAAAAATCTTGACTCCTGCCAAG
AAATCCTTTCTTAGAAGGTTGTTTGATTAG (SEQ ID NO: 159)
>Homo sapiens JAK3 isoform 2 (UniProt Accession P52333-1)
MAPPSEETPLIPQRSCSLLSTEAGALHVLLPARGPGPPQRLSFSFGDHLAEDLCVQAAKASGILPVYHSLFALA
TEDLSCWFPPSHIFSVEDASTQVLLYRIRFYFPNWFGLEKCHRFGLRKDLASAILDLPVLEHLFAQHRSDLVSG
RLPVGLSLKEQGECLSLAVLDLARMAREQAQRPGELLKTVSYKACLPPSLRDLIQGLSFVTRRRIRRTVRRALR
RVAACQADRHSLMAKYIMDLERLDPAGAAETFHVGLPGALGGHDGLGLLRVAGDGGIAWTQGEQEVLQPFCDFP
EIVDISIKQAPRVGPAGEHRLVTVTRTDNQILEAEFPGLPEALSFVALVDGYFRLTTDSQHFFCKEVAPPRLLE
EVAEQCHGPITLDFAINKLKTGGSRPGSYVLRRSPQDFDSFLLTVCVQNPLGPDYKGCLIRRSPTGTFLLVGLS
RPHSSLRELLATCWDGGLHVDGVAVTLTSCCIPRPKEKSNLIVVQRGHSPPTSSLVQPQSQYQLSQMTFHKIPA
DSLEWHENLGHGSFTKIYRGCRHEVVDGEARKTEVLLKVMDAKHKNCMESFLEAASLMSQVSYRHLVLLHGVCM
AGDSTMVQEFVHLGAIDMYLRKRGHLVPASWKLQVVKQLAYALNYLEDKGLPHGNVSARKVLLAREGADGSPPF
IKLSDPGVSPAVLSLEMLTDRIPWVAPECLREAQTLSLEADKWGFGATVWEVFSGVTMPISALDPAKKLQFYED
RQQLPAPKWTELALLIQQCMAYEPVQRPSFRAVIRDLNSLISSDYELLSDPTPGALAPRDGLWNGAQLYACQDP
TIFEERHLKYISQLGKGNFGSVELCRYDPLGDNTGALVAVKQLQHSGPDQQRDFQREIQILKALHSDFIVKYRG
VSYGPGRQSLRLVMEYLPSGCLRDFLQRHRARLDASRLLLYSSQICKGMEYLGSRRCVHRDLAARNILVESEAH
VKIADFGLAKLLPLDKDYYWREPGQSPIFVVYAPESLSDNIFSRQSDVWSFGVVLYELFTYCDKSCSPSAEFLR
MMGCERDVPALCRLLELLEEGQRLPAPPACPAEVHELMKLCWAPSPQDRPSFSALGPQLDMLWSGSRGCETHAF
TAHPEGKHHSLSFS (SEQ ID NO: 160)
>Homo sapiens PNP (UniProt Accession P00491)
MENGYTYEDYKNTAEWLLSHTKHRPQVAIICGSGLGGLTDKLTQAQIFDYGEIPNFPRSTVPGHAGRLVFGFLN
GRACVMMQGRFHMYEGYPLWKVTFPVRVFHLLGVDTLVVTNAAGGLNPKFEVGDIMLIRDHINLPGFSGQNPLR
GPNDERFGDRFPAMSDAYDRTMRQRALSTWKQMGEQRELQEGTYVMVAGPSFETVAECRVLQKLGADAVGMSTV
PEVIVARHCGLRVFGFSLITNKVIMDYESLEKANHEEVLAAGKQAAQKLEQFVSILMASIPLPDKAS (SEQ
ID NO: 161)
>Homo sapiens ADA (UniProt Accession P00813)
MAQTPAFDKPKVELHVHLDGSIKPETILYYGRRRGIALPANTAEGLLNVIGMDKPLTLPDFLAKFDYYMPAIAG
CREAIKRIAYEFVEMKAKEGVVYVEVRYSPHLLANSKVEPIPWNQAEGDLTPDEVVALVGQGLQEGERDFGVKA
RSILCCMRHQPNWSPKVVELCKKYQQQTVVAIDLAGDETIPGSSLLPGHVQAYQEAVKSGIHRTVHAGEVGSAE
VVKEAVDILKTERLGHGYHTLEDQALYNRLRQENMHFEICPWSSYLTGAWKPDTEHAVIRLKNDQANYSLNTDD
PLIFKSTLDTDYQMTKRDMGFTEEEFKRLNINAAKSSFLPEDEKRELLDLLYKAYGMPPSASAGQNL (SEQ
ID NO: 162)
>Homo sapiens RAGI isoform 1 (UniProt Accession P15918-1)
MAASFPPTLGLSSAPDEIQHPHIKFSEWKFKLFRVRSFEKTPEEAQKEKKDSFEGKPSLEQSPAVLDKADGQKP
VPTQPLLKAHPKFSKKFHDNEKARGKAIHQANLRHLCRICGNSFRADEHNRRYPVHGPVDGKTLGLLRKKEKRA
TSWPDLIAKVFRIDVKADVDSIHPTEFCHNCWSIMHRKFSSAPCEVYFPRNVTMEWHPHTPSCDICNTARRGLK
RKSLQPNLQLSKKLKTVLDQARQARQHKRRAQARISSKDVMKKIANCSKIHLSTKLLAVDFPEHEVKSISCQIC
EHILADPVETNCKHVFCRVCILRCLKVMGSYCPSCRYPCFPTDLESPVKSFLSVLNSLMVKCPAKECNEEVSLE
KYNHHISSHKESKEIFVHINKGGRPRQHLLSLTRRAQKHRLRELKLQVKAFADKEEGGDVKSVCMTLFLLALRA
RNEHRQADELEAIMQGKGSGLQPAVCLAIRVNTFLSCSQYHKMYRTVKAITGRQIFQPLHALRNAEKVLLPGYH
HFEWQPPLKNVSSSTDVGIIDGLSGLSSSVDDYPVDTIAKRFRYDSALVSALMDMEEDILEGMRSQDLDDYLNG
PFTVVVKESCDGMGDVSEKHGSGPVVPEKAVRFSFTIMKITIAHSSQNVKVFEEAKPNSELCCKPLCLMLADES
DHETLTAILSPLIAEREAMKSSELMLELGGILRTFKFIFRGTGYDEKLVREVEGLEASGSVYICTLCDATRLEA
SQNLVFHSITRSHAENLERYEVWRSNPYHESVEELRDRVKGVSAKPFIETVPSIDALHCDIGNAAEFYKIFQLE
IGEVYKNPNASKEERKRWQATLDKHLRKKMNLKPIMRMNGNFARKLMTKETVDAVCELIPSEERHEALRELMDL
YLKMKPVWRSSCPAKECPESLCQYSFNSQRFAELLSTKFKYRYEGKITNYFHKTLAHVPEIIERDGSIGAWASE
GNESGNKLFRRFRKMNARQSKCYEMEDVLKHHWLYTSKYLQKFMNAHNALKTSGFTMNPQASLGDPLGIEDSLE
SQDSMEF (SEQ ID NO: 163)
>Homo sapiens RAG2 (UniProt Accession P55895)
MSLQMVTVSNNIALIQPGFSLMNFDGQVFFFGQKGWPKRSCPTGVFHLDVKHNHVKLKPTIFSKDSCYLPPLRY
PATCTFKGSLESEKHQYIIHGGKTPNNEVSDKIYVMSIVCKNNKKVTFRCTEKDLVGDVPEARYGHSINVVYSR
GKSMGVLFGGRSYMPSTHRTTEKWNSVADCLPCVFLVDFEFGCATSYILPELQDGLSFHVSIAKNDTIYILGGH
SLANNIRPANLYRIRVDLPLGSPAVNCTVLPGGISVSSAILTQTNNDEFVIVGGYQLENQKRMICNIISLEDNK
IEIREMETPDWTPDIKHSKIWFGSNMGNGTVFLGIPGDNKQVVSEGFYFYMLKCAEDDTNEEQTTFTNSQTSTE
DPGDSTPFEDSEEFCFSAEANSFDGDDEFDTYNEDDEEDESETGYWITCCPTCDVDINTWVPFYSTELNKPAMI
YCSHGDGHWVHAQCMDLAERTLIHLSAGSNKYYCNEHVEIARALHTPQRVLPLKKPPMKSLRKKGSGKILTPAK
KSFLRRLFD (SEQ ID NO: 164)
>PGK promoter associated with FANCA gene
GGGGTTGGGGTTGCGCCTTTTCCAAGGCAGCCCTGGGTTTGCGCAGGGACGCGGCTGCTCTGGGCGTGGTTCCG
GGAAACGCAGCGGCGCCGACCCTGGGTCTCGCACATTCTTCACGTCCGTTCGCAGCGTCACCCGGATCTTCGCC
GCTACCCTTGTGGGCCCCCCGGCGACGCTTCCTGCTCCGCCCCTAAGTCGGGAAGGTTCCTTGCGGTTCGCGGC
GTGCCGGACGTGACAAACGGAAGCCGCACGTCTCACTAGTACCCTCGCAGACGGACAGCGCCAGGGAGCAATGG
CAGCGCGCCGACCGCGATGGGCTGTGGCCAATAGCGGCTGCTCAGCGGGGCGCGCCGAGAGCAGCGGCCGGGAA
GGGGCGGTGCGGGAGGCGGGGTGTGGGGCGGTAGTGTGGGCCCTGTTCCTGCCCGCGCGGTGTTCCGCATTCTG
CAAGCCTCCGGAGCGCACGTCGGCAGTCGGCTCCCTCGTTGACCGAATCACCGACCTCTCTCCCCAGGGGGATC
CACCGGTCCGCCAAGGCCATGTCCGACTCGTGGGTCCCGAACTCCGCCTCGGGCCAGGACCCAGGGGGCCGCCG
GAGGGCCTGGGCCGAGCTGCTGGCGGGAAGGGTCAAGAGGGAAAAATATAATCCTGAAAGGGCACAGAAATTAA
AGGAATCAGCTGTGCGCCTCCTGCGAAGCCATCAGGACCTGAATGCCCTTTTGCTTGAGGTAGAAGGTCCACTG
TGTAAAAAATTGTCTCTCAGCAAAGTGATTGACTGTGACAGTTCTGAGGCCTATGCTAATCATTCTAGTTCATT
TATAGGCTCTGCTTTGCAGGATCAAGCCTCAAGGCTGGGGGTTCCCGTGGGTATTCTCTCAGCCGGGATGGTTG
CCTCTAGCGTGGGACAGATCTGCACGGCTCCAGCGGAGACCAGTCACCCTGTGCTGCTGACTGTGGAGCAGAGA
AAGAAGCTGTCTTCCCTGTTAGAGTTTGCTCAGTATTTATTGGCACACAGTATGTTCTCCCGTCTTTCCTTCTG
TCAAGAATTATGGAAAATACAGAGTTCTTTGTTGCTTGAAGCGGTGTGGCATCTTCACGTACAAGGCATTGTGA
GCCTGCAAGAGCTGCTGGAAAGCCATCCCGACATGCATGCTGTGGGATCGTGGCTCTTCAGGAATCTGTGCTGC
CTTTGTGAACAGATGGAAGCATCCTGCCAGCATGCTGACGTCGCCAGGGCCATGCTTTCTGATTTTGTTCAAAT
GTTTGTTTTGAGGGGATTTCAGAAAAACTCAGATCTGAGAAGAACTGTGGAGCCTGAAAAAATGCCGCAGGTCA
CGGTTGATGTACTGCAGAGAATGCTGATTTTTGCACTTGACGCTTTGGCTGCTGGAGTACAGGAGGAGTCCTCC
ACTCACAAGATCGTGAGGTGCTGGTTCGGAGTGTTCAGTGGACACACGCTTGGCAGTGTAATTTCCACAGATCC
TCTGAAGAGGTTCTTCAGTCATACCCTGACTCAGATACTCACTCACAGCCCTGTGCTGAAAGCATCTGATGCTG
TTCAGATGCAGAGAGAGTGGAGCTTTGCGCGGACACACCCTCTGCTCACCTCACTGTACCGCAGGCTCTTTGTG
ATGCTGAGTGCAGAGGAGTTGGTTGGCCATTTGCAAGAAGTTCTGGAAACGCAGGAGGTTCACTGGCAGAGAGT
GCTCTCCTTTGTGTCTGCCCTGGTTGTCTGCTTTCCAGAAGCGCAGCAGCTGCTTGAAGACTGGGTGGCGCGTT
TGATGGCCCAGGCATTCGAGAGCTGCCAGCTGGACAGCATGGTCACTGCGTTCCTGGTTGTGCGCCAGGCAGCA
CTGGAGGGCCCCTCTGCGTTCCTGTCATATGCAGACTGGTTCAAGGCCTCCTTTGGGAGCACACGAGGCTACCA
TGGCTGCAGCAAGAAGGCCCTGGTCTTCCTGTTTACGTTCTTGTCAGAACTCGTGCCTTTTGAGTCTCCCCGGT
ACCTGCAGGTGCACATTCTCCACCCACCCCTGGTTCCCAGCAAGTACCGCTCCCTCCTCACAGACTACATCTCA
TTGGCCAAGACACGGCTGGCCGACCTCAAGGTTTCTATAGAAAACATGGGACTCTACGAGGATTTGTCATCAGC
TGGGGACATTACTGAGCCCCACAGCCAAGCTCTTCAGGATGTTGAAAAGGCCATCATGGTGTTTGAGCATACGG
GGAACATCCCAGTCACCGTCATGGAGGCCAGCATATTCAGGAGGCCTTACTACGTGTCCCACTTCCTCCCCGCC
CTGCTCACACCTCGAGTGCTCCCCAAAGTCCCTGACTCCCGTGTGGCGTTTATAGAGTCTCTGAAGAGAGCAGA
TAAAATCCCCCCATCTCTGTACTCCACCTACTGCCAGGCCTGCTCTGCTGCTGAAGAGAAGCCAGAAGATGCAG
CCCTGGGAGTGAGGGCAGAACCCAACTCTGCTGAGGAGCCCCTGGGACAGCTCACAGCTGCACTGGGAGAGCTG
AGAGCCTCCATGACAGACCCCAGCCAGCGTGATGTTATATCGGCACAGGTGGCAGTGATTTCTGAAAGACTGAG
GGCTGTCCTGGGCCACAATGAGGATGACAGCAGCGTTGAGATATCAAAGATTCAGCTCAGCATCAACACGCCGA
GACTGGAGCCACGGGAACACATTGCTGTGGACCTCCTGCTGACGTCTTTCTGTCAGAACCTGATGGCTGCCTCC
AGTGTCGCTCCCCCGGAGAGGCAGGGTCCCTGGGCTGCCCTCTTCGTGAGGACCATGTGTGGACGTGTGCTCCC
TGCAGTGCTCACCCGGCTCTGCCAGCTGCTCCGTCACCAGGGCCCGAGCCTGAGTGCCCCACATGTGCTGGGGT
TGGCTGCCCTGGCCGTGCACCTGGGTGAGTCCAGGTCTGCGCTCCCAGAGGTGGATGTGGGTCCTCCTGCACCT
GGTGCTGGCCTTCCTGTCCCTGCGCTCTTTGACAGCCTCCTGACCTGTAGGACGAGGGATTCCTTGTTCTTCTG
CCTGAAATTTTGTACAGCAGCAATTTCTTACTCTCTCTGCAAGTTTTCTTCCCAGTCACGAGATACTTTGTGCA
GCTGCTTATCTCCAGGCCTTATTAAAAAGTTTCAGTTCCTCATGTTCAGATTGTTCTCAGAGGCCCGACAGCCT
CTTTCTGAGGAGGACGTAGCCAGCCTTTCCTGGAGACCCTTGCACCTTCCTTCTGCAGACTGGCAGAGAGCTGC
CCTCTCTCTCTGGACACACAGAACCTTCCGAGAGGTGTTGAAAGAGGAAGATGTTCACTTAACTTACCAAGACT
GGTTACACCTGGAGCTGGAAATTCAACCTGAAGCTGATGCTCTTTCAGATACTGAACGGCAGGACTTCCACCAG
TGGGCGATCCATGAGCACTTTCTCCCTGAGTCCTCGGCTTCAGGGGGCTGTGACGGAGACCTGCAGGCTGCGTG
TACCATTCTTGTCAACGCACTGATGGATTTCCACCAAAGCTCAAGGAGTTATGACCACTCAGAAAATTCTGATT
TGGTCTTTGGTGGCCGCACAGGAAATGAGGATATTATTTCCAGATTGCAGGAGATGGTAGCTGACCTGGAGCTG
CAGCAAGACCTCATAGTGCCTCTCGGCCACACCCCTTCCCAGGAGCACTTCCTCTTTGAGATTTTCCGCAGACG
GCTCCAGGCTCTGACAAGCGGGTGGAGCGTGGCTGCCAGCCTTCAGAGACAGAGGGAGCTGCTAATGTACAAAC
GGATCCTCCTCCGCCTGCCTTCGTCTGTCCTCTGCGGCAGCAGCTTCCAGGCAGAACAGCCCATCACTGCCAGA
TGCGAGCAGTTCTTCCACTTGGTCAACTCTGAGATGAGAAACTTCTGCTCCCACGGAGGTGCCCTGACACAGGA
CATCACTGCCCACTTCTTCAGGGGCCTCCTGAACGCCTGTCTGCGGAGCAGAGACCCCTCCCTGATGGTCGACT
TCATACTGGCCAAGTGCCAGACGAAATGCCCCTTAATTTTGACCTCTGCTCTGGTGTGGTGGCCGAGCCTGGAG
CCTGTGCTGCTCTGCCGGTGGAGGAGACACTGCCAGAGCCCGCTGCCCCGGGAACTGCAGAAGCTACAAGAAGG
CCGGCAGTTTGCCAGCGATTTCCTCTCCCCTGAGGCTGCCTCCCCAGCACCCAACCCGGACTGGCTCTCAGCTG
CTGCACTGCACTTTGCGATTCAACAAGTCAGGGAAGAAAACATCAGGAAGCAGCTAAAGAAGCTGGACTGCGAG
AGAGAGGAGCTATTGGTTTTCCTTTTCTTCTTCTCCTTGATGGGCCTGCTGTCGTCACATCTGACCTCAAATAG
CACCACAGACCTGCCAAAGGCTTTCCACGTTTGTGCAGCAATCCTCGAGTGTTTAGAGAAGAGGAAGATATCCT
GGCTGGCACTCTTTCAGTTGACAGAGAGTGACCTCAGGCTGGGGCGGCTCCTCCTCCGTGTGGCCCCGGATCAG
CACACCAGGCTGCTGCCTTTCGCTTTTTACAGTCTTCTCTCCTACTTCCATGAAGACGCGGCCATCAGGGAAGA
GGCCTTCCTGCATGTTGCTGTGGACATGTACTTGAAGCTGGTCCAGCTCTTCGTGGCTGGGGATACAAGCACAG
TTTCACCTCCAGCTGGCAGGAGCCTGGAGCTCAAGGGTCAGGGCAACCCCGTGGAACTGATAACAAAAGCTCGT
CTTTTTCTGCTGCAGTTAATACCTCGGTGCCCGAAAAAGAGCTTCTCACACGTGGCAGAGCTGCTGGCTGATCG
TGGGGACTGCGACCCAGAGGTGAGCGCCGCCCTCCAGAGCAGACAGCAGGCTGCCCCTGACGCTGACCTGTCCC
AGGAGCCTCATCTCTTCTGA (SEQ ID NO: 165)
>506 PGK.FancA
TCGCGCGTTCTCGAGGAGCTTGGCCCATTGCATACGTTGTATCCATATCATAATATGTACATTTATATTGGCTC
ATGTCCAACATTACCGCCATGTTGACATTGATTATTGACTAGTTATTAATAGTAATCAATTACGGGGTCATTAG
TTCATAGCCCATATATGGAGTTCCGCGTTACATAACTTACGGTAAATGGCCCGCCTGGCTGACCGCCCAACGAC
CCCCGCCCATTGACGTCAATAATGACGTATGTTCCCATAGTAACGCCAATAGGGACTTTCCATTGACGTCAATG
GGTGGAGTATTTACGCTAAACTGCCCACTTGGCAGTACATCAAGTGTATCATATGCCAAGTACGCCCCCTATTG
ACGTCAATGACGGTAAATGGCCCGCCTGGCATTATGCCCAGTACATGACCTTATGGGACTTTCCTACTTGGCAG
TACATCTACGTATTAGTCATCGCTATTACCATGGTGATGCGGTTTTGGCAGTACATCAATGGGCGTGGATAGCG
GTTTGACTCACGGGGATTTCCAAGTCTCCACCCCATTGACGCAAATGGGCGGTAGGCGTGTACGGTGGGAGGTC
TATATAAGCAGAGCTTCTAGATTGTACGGGAGCTCTCTCTTCACTACTCGCTGCGTCGAGAGTGTACGAGACTC
TCCAGGTTTGGTAAGAAATATTTTATATTGTTATAATGTTACTATGATCCATTAACACTCTGCTTATAGATTGT
AAGGGTGATTGCAATGCTTTCTGCATAAAACTTTGGTTTTCTTGTTAATCAATAAACCGACTTGATTCGAGAAC
CTACTCATATATTATTGTCTCTTTTATACTTTATTAAGTAAAAGGATTTGTATATTAGCCTTGCTAAGGGAGAC
ATCTAGTGATATAAGTGTGAACTACACTTATCTTAAATGATGTAACTCCTTAGGATAATCAATATACAAAATTC
CATGACAATTGGCGCCCAACGTGGGGCTCGAATATAAGTCGGGTTTATTTGTAAATTATCCCTAGGGACCTCCG
AGCATAGCGGGAGGCATATAAAAGCCAATAGACAATGGCTAGCAGGAAGTAATGTTGAAGAATATGAACTTGAT
GTTGAAGCTCTGGTTGTAATTTTAAGAGATAGAAATATACCAAGAAATCCTTTACATGGAGAAGTTATAGGTCT
TCGCCTTACTGAAGGATGGTGGGGACAAATTGAGAGATTTCAGATGGTACGTTGATTCGAATTAAGGCTATGGA
TTTGGCCATGGGACAAGAAATATTAGTTTATAGTCCCATTGTATCTATGACTAAAATACAAAAAACTCCACTAC
CAGAAAGAAAAGCTTTACCCATTAGATGGATAACATGGATGACTTATTTAGAAGATCCAAGAATCCAATTTCAT
TATGATAAAACCTTACCAGAACTTAAGCATATTCCAGATGTATATACATCTAGTCAGTCTCCTGTTAAACATCC
TTCTCAATATGAAGGAGTGTTTTATACTGATGGCTCGGCCATCAAAAGTCCTGATCCTACAAAAAGCAATAATG
CTGGCATGGGAATAGTACATGCCACATACAAACCTGAATATCAAGTTTTGAATCAATGGTCAATACCACTAGGT
AATCATACTGCTCAGATGGCTGAAATAGCTGCAGTTGAATTTGCCTGTAAAAAAGCTTTAAAAATACCTGGTCC
TGTATTAGTTATAACTGATAGTTTCTATGTAGCAGAAAGTGCTAATAAAGAATTACCATACTGGAAATCTAATG
GGTTTGTTAATAATAAGAAAAAGCCTCTTAAACATATCTCCAAATGGAAATCTATTGCTGAGTGTTTATCTATG
AAACCAGACATTACTATTCAACATGAAAAAGGCATCAGCCTACAAATACCAGTATTCATACTGAAAGGCAATGC
CCTAGCAGATAAGCTTGCCACCCAAGGAAGTTATGTGGTTAATTGTAATACCAAAAAACCAAACCTGGATGCAG
AGTTGGATCAATTATTACAGGGTCATTATATAAAAGGATATCCCAAACAATATACATATTTTTTAGAAGATGGC
AAAGTAAAAGTTTCCAGACCTGAAGGGGTTAAAATTATTCCCCCTCAGTCAGACAGACAAAAAATTGTGCTTCA
AGCCCACAATTTGGCTCACACCGGACGTGAAGCCACTCTTTTAAAAATTGCCAACCTTTATTGGTGGCCAAATA
TGAGAAAGGATGTGGTTAAACAACTAGGACGCTGTCAACAGTGTTTAATCACAAATGCTTCCAACAAAGCCTCT
GGTCCTATTCTAAGACCAGATAGGCCTCAAAAACCTTTTGATAAATTCTTTATTGACTATATTGGACCTTTGCC
ACCTTCACAGGGATACCTATATGTATTAGTAGTTGTTGATGGAATGACAGGATTCACTTGGTTATACCCCACTA
AGGCTCCTTCTACTAGCGCAACTGTTAAATCTCTCAATGTACTCACTAGTATTGCAATTCCAAAGGTGATTCAC
TCTGATCAAGGTGCAGCATTCACTTCTTCAACCTTTGCTGAATGGGCAAAGGAAAGAGGTATACATTTGGAATT
CAGTACTCCTTATCACCCCCAAAGTGGTAGTAAGGTGGAAAGGAAAAATAGTGATATAAAACGACTTTTAACTA
AACTGCTAGTAGGAAGACCCACAAAGTGGTATGACCTATTGCCTGTTGTACAACTTGCTTTAAACAACACCTAT
AGCCCTGTATTAAAATATACTCCACATCAACTCTTATTTGGTATAGATTCAAATACTCCATTTGCAAATCAAGA
TACACTTGACTTGACCAGAGAAGAAGAACTTTCTCTTTTACAGGAAATTCGTACTTCTTTATACCATCCATCCA
CCCCTCCAGCCTCCTCTCGTTCCTGGTCTCCTGTTGTTGGCCAATTGGTCCAGGAGAGGGTGGCTAGGCCTGCT
TCTTTGAGACCTCGTTGGCATAAACCGTCTACTGTACTTAAGGTGTTGAATCCAAGGACTGTTGTTATTTTGGA
CCATCTTGGCAACAACAGAACTGTAAGTATAGATAATTTAAAACCTACTTCTCATCAGAATGGCACCACCAATG
ACACTGCAACAATGGATCATTTGGAAAAAAATGAATAAAGCGCATGAGGCACTTCAAAATACAACAACTGTGAC
TGAACAGCAGAAGGAACAAATTATACTGGACATTCAAAATGAAGAAGTACAACCAACTAGGAGAGATAAATTTA
GATATCTGCTTTATACTTGTTGTGCTACTAGCTCAAGAGTATTGGCCTGGATGTTTTTAGTTTGTATATTGTTA
ATCATTGTTTTGGTTTCATGCTTTGTGACTATATCCAGAATACAATGGAATAAGGATATTCAGGTATTAGGACC
TGTAATAGACTGGAATGTTACTCAAAGAGCTGTTTATCAACCCTTACAGACTAGAAGGATTGCACGTTCCCTTA
GAATGCAGCATCCTGTTCCAAAATATGTGGAGGTAAATATGACTAGTATTCCACAAGGTGTATACTATGAACCC
CATCCGGCGCGCCAGATCTGCATGCCACGGGGTTGGGGTTGCGCCTTTTCCAAGGCAGCCCTGGGTTTGCGCAG
GGACGCGGCTGCTCTGGGCGTGGTTCCGGGAAACGCAGCGGCGCCGACCCTGGGTCTCGCACATTCTTCACGTC
CGTTCGCAGCGTCACCCGGATCTTCGCCGCTACCCTTGTGGGCCCCCCGGCGACGCTTCCTGCTCCGCCCCTAA
GTCGGGAAGGTTCCTTGCGGTTCGCGGCGTGCCGGACGTGACAAACGGAAGCCGCACGTCTCACTAGTACCCTC
GCAGACGGACAGCGCCAGGGAGCAATGGCAGCGCGCCGACCGCGATGGGCTGTGGCCAATAGCGGCTGCTCAGC
GGGGCGCGCCGAGAGCAGCGGCCGGGAAGGGGCGGTGCGGGAGGCGGGGTGTGGGGCGGTAGTGTGGGCCCTGT
TCCTGCCCGCGCGGTGTTCCGCATTCTGCAAGCCTCCGGAGCGCACGTCGGCAGTCGGCTCCCTCGTTGACCGA
ATCACCGACCTCTCTCCCCAGGGGGATCCACCGGTCCGCCAAGGCCATGTCCGACTCGTGGGTCCCGAACTCCG
CCTCGGGCCAGGACCCAGGGGGCCGCCGGAGGGCCTGGGCCGAGCTGCTGGCGGGAAGGGTCAAGAGGGAAAAA
TATAATCCTGAAAGGGCACAGAAATTAAAGGAATCAGCTGTGCGCCTCCTGCGAAGCCATCAGGACCTGAATGC
CCTTTTGCTTGAGGTAGAAGGTCCACTGTGTAAAAAATTGTCTCTCAGCAAAGTGATTGACTGTGACAGTTCTG
AGGCCTATGCTAATCATTCTAGTTCATTTATAGGCTCTGCTTTGCAGGATCAAGCCTCAAGGCTGGGGGTTCCC
GTGGGTATTCTCTCAGCCGGGATGGTTGCCTCTAGCGTGGGACAGATCTGCACGGCTCCAGCGGAGACCAGTCA
CCCTGTGCTGCTGACTGTGGAGCAGAGAAAGAAGCTGTCTTCCCTGTTAGAGTTTGCTCAGTATTTATTGGCAC
ACAGTATGTTCTCCCGTCTTTCCTTCTGTCAAGAATTATGGAAAATACAGAGTTCTTTGTTGCTTGAAGCGGTG
TGGCATCTTCACGTACAAGGCATTGTGAGCCTGCAAGAGCTGCTGGAAAGCCATCCCGACATGCATGCTGTGGG
ATCGTGGCTCTTCAGGAATCTGTGCTGCCTTTGTGAACAGATGGAAGCATCCTGCCAGCATGCTGACGTCGCCA
GGGCCATGCTTTCTGATTTTGTTCAAATGTTTGTTTTGAGGGGATTTCAGAAAAACTCAGATCTGAGAAGAACT
GTGGAGCCTGAAAAAATGCCGCAGGTCACGGTTGATGTACTGCAGAGAATGCTGATTTTTGCACTTGACGCTTT
GGCTGCTGGAGTACAGGAGGAGTCCTCCACTCACAAGATCGTGAGGTGCTGGTTCGGAGTGTTCAGTGGACACA
CGCTTGGCAGTGTAATTTCCACAGATCCTCTGAAGAGGTTCTTCAGTCATACCCTGACTCAGATACTCACTCAC
AGCCCTGTGCTGAAAGCATCTGATGCTGTTCAGATGCAGAGAGAGTGGAGCTTTGCGCGGACACACCCTCTGCT
CACCTCACTGTACCGCAGGCTCTTTGTGATGCTGAGTGCAGAGGAGTTGGTTGGCCATTTGCAAGAAGTTCTGG
AAACGCAGGAGGTTCACTGGCAGAGAGTGCTCTCCTTTGTGTCTGCCCTGGTTGTCTGCTTTCCAGAAGCGCAG
CAGCTGCTTGAAGACTGGGTGGCGCGTTTGATGGCCCAGGCATTCGAGAGCTGCCAGCTGGACAGCATGGTCAC
TGCGTTCCTGGTTGTGCGCCAGGCAGCACTGGAGGGCCCCTCTGCGTTCCTGTCATATGCAGACTGGTTCAAGG
CCTCCTTTGGGAGCACACGAGGCTACCATGGCTGCAGCAAGAAGGCCCTGGTCTTCCTGTTTACGTTCTTGTCA
GAACTCGTGCCTTTTGAGTCTCCCCGGTACCTGCAGGTGCACATTCTCCACCCACCCCTGGTTCCCAGCAAGTA
CCGCTCCCTCCTCACAGACTACATCTCATTGGCCAAGACACGGCTGGCCGACCTCAAGGTTTCTATAGAAAACA
TGGGACTCTACGAGGATTTGTCATCAGCTGGGGACATTACTGAGCCCCACAGCCAAGCTCTTCAGGATGTTGAA
AAGGCCATCATGGTGTTTGAGCATACGGGGAACATCCCAGTCACCGTCATGGAGGCCAGCATATTCAGGAGGCC
TTACTACGTGTCCCACTTCCTCCCCGCCCTGCTCACACCTCGAGTGCTCCCCAAAGTCCCTGACTCCCGTGTGG
CGTTTATAGAGTCTCTGAAGAGAGCAGATAAAATCCCCCCATCTCTGTACTCCACCTACTGCCAGGCCTGCTCT
GCTGCTGAAGAGAAGCCAGAAGATGCAGCCCTGGGAGTGAGGGCAGAACCCAACTCTGCTGAGGAGCCCCTGGG
ACAGCTCACAGCTGCACTGGGAGAGCTGAGAGCCTCCATGACAGACCCCAGCCAGCGTGATGTTATATCGGCAC
AGGTGGCAGTGATTTCTGAAAGACTGAGGGCTGTCCTGGGCCACAATGAGGATGACAGCAGCGTTGAGATATCA
AAGATTCAGCTCAGCATCAACACGCCGAGACTGGAGCCACGGGAACACATTGCTGTGGACCTCCTGCTGACGTC
TTTCTGTCAGAACCTGATGGCTGCCTCCAGTGTCGCTCCCCCGGAGAGGCAGGGTCCCTGGGCTGCCCTCTTCG
TGAGGACCATGTGTGGACGTGTGCTCCCTGCAGTGCTCACCCGGCTCTGCCAGCTGCTCCGTCACCAGGGCCCG
AGCCTGAGTGCCCCACATGTGCTGGGGTTGGCTGCCCTGGCCGTGCACCTGGGTGAGTCCAGGTCTGCGCTCCC
AGAGGTGGATGTGGGTCCTCCTGCACCTGGTGCTGGCCTTCCTGTCCCTGCGCTCTTTGACAGCCTCCTGACCT
GTAGGACGAGGGATTCCTTGTTCTTCTGCCTGAAATTTTGTACAGCAGCAATTTCTTACTCTCTCTGCAAGTTT
TCTTCCCAGTCACGAGATACTTTGTGCAGCTGCTTATCTCCAGGCCTTATTAAAAAGTTTCAGTTCCTCATGTT
CAGATTGTTCTCAGAGGCCCGACAGCCTCTTTCTGAGGAGGACGTAGCCAGCCTTTCCTGGAGACCCTTGCACC
TTCCTTCTGCAGACTGGCAGAGAGCTGCCCTCTCTCTCTGGACACACAGAACCTTCCGAGAGGTGTTGAAAGAG
GAAGATGTTCACTTAACTTACCAAGACTGGTTACACCTGGAGCTGGAAATTCAACCTGAAGCTGATGCTCTTTC
AGATACTGAACGGCAGGACTTCCACCAGTGGGCGATCCATGAGCACTTTCTCCCTGAGTCCTCGGCTTCAGGGG
GCTGTGACGGAGACCTGCAGGCTGCGTGTACCATTCTTGTCAACGCACTGATGGATTTCCACCAAAGCTCAAGG
AGTTATGACCACTCAGAAAATTCTGATTTGGTCTTTGGTGGCCGCACAGGAAATGAGGATATTATTTCCAGATT
GCAGGAGATGGTAGCTGACCTGGAGCTGCAGCAAGACCTCATAGTGCCTCTCGGCCACACCCCTTCCCAGGAGC
ACTTCCTCTTTGAGATTTTCCGCAGACGGCTCCAGGCTCTGACAAGCGGGTGGAGCGTGGCTGCCAGCCTTCAG
AGACAGAGGGAGCTGCTAATGTACAAACGGATCCTCCTCCGCCTGCCTTCGTCTGTCCTCTGCGGCAGCAGCTT
CCAGGCAGAACAGCCCATCACTGCCAGATGCGAGCAGTTCTTCCACTTGGTCAACTCTGAGATGAGAAACTTCT
GCTCCCACGGAGGTGCCCTGACACAGGACATCACTGCCCACTTCTTCAGGGGCCTCCTGAACGCCTGTCTGCGG
AGCAGAGACCCCTCCCTGATGGTCGACTTCATACTGGCCAAGTGCCAGACGAAATGCCCCTTAATTTTGACCTC
TGCTCTGGTGTGGTGGCCGAGCCTGGAGCCTGTGCTGCTCTGCCGGTGGAGGAGACACTGCCAGAGCCCGCTGC
CCCGGGAACTGCAGAAGCTACAAGAAGGCCGGCAGTTTGCCAGCGATTTCCTCTCCCCTGAGGCTGCCTCCCCA
GCACCCAACCCGGACTGGCTCTCAGCTGCTGCACTGCACTTTGCGATTCAACAAGTCAGGGAAGAAAACATCAG
GAAGCAGCTAAAGAAGCTGGACTGCGAGAGAGAGGAGCTATTGGTTTTCCTTTTCTTCTTCTCCTTGATGGGCC
TGCTGTCGTCACATCTGACCTCAAATAGCACCACAGACCTGCCAAAGGCTTTCCACGTTTGTGCAGCAATCCTC
GAGTGTTTAGAGAAGAGGAAGATATCCTGGCTGGCACTCTTTCAGTTGACAGAGAGTGACCTCAGGCTGGGGCG
GCTCCTCCTCCGTGTGGCCCCGGATCAGCACACCAGGCTGCTGCCTTTCGCTTTTTACAGTCTTCTCTCCTACT
TCCATGAAGACGCGGCCATCAGGGAAGAGGCCTTCCTGCATGTTGCTGTGGACATGTACTTGAAGCTGGTCCAG
CTCTTCGTGGCTGGGGATACAAGCACAGTTTCACCTCCAGCTGGCAGGAGCCTGGAGCTCAAGGGTCAGGGCAA
CCCCGTGGAACTGATAACAAAAGCTCGTCTTTTTCTGCTGCAGTTAATACCTCGGTGCCCGAAAAAGAGCTTCT
CACACGTGGCAGAGCTGCTGGCTGATCGTGGGGACTGCGACCCAGAGGTGAGCGCCGCCCTCCAGAGCAGACAG
CAGGCTGCCCCTGACGCTGACCTGTCCCAGGAGCCTCATCTCTTCTGACGGGACCTGCCACTGCACACCAGCCC
AGCTCCCGTGTAAATAATTTATTACAAGCATAACATGGAGCTCTTGTTGCACTAAAAAGTGGATTACAAATCTC
CTCGACTGCTTTAGTGGGGAAAGGAATCAATTATTTATGAACTGTCCGGCCCCGAGTCACTCAGCGTTTGCGGG
AAAATAAACCACTGGTCCCAGAGCAGAGGAAGGCTACTTGAGCCGGACACCAAGCCCGCCTCCAGCACCAAGGG
CGGGCAGCACCCTCCGACCCTCCCATGCGGGTGCACACGAAGGGTGAGGCTGACACAGCCACTGCGGAGTCCAG
GCTGCTAGAGGTGCTCATCCTCACTGCCGTCCTCAGGTGGGTTCGGGCTTCACCGCCTGGCCCTCTGTGGTCAC
AGAGGGGCTCGGTGGCCCAGGTGGTGGTTCCGCCTCCAGGGGCAGGGCCTTGTCCTGGGTCTGTGTCAGCGGGT
GCACCATGGACATGTGTACAAGTAAAGCGGCCGCGTCGAGGGCTGCAGGAATTCGAGCATCTTACCGCCATTTA
TTCCCATATTTGTTCTGTTTTTCTTGATTTGGGTATACATTTAAATGTTAATAAAACAAAATGGTGGGGCAATC
ATTTACATTTTTAGGGATATGTAATTACTAGTTCAGGTGTATTGCCACAAGACAAACATGTTAAGAAACTTTCC
CGTTATTTACGCTCTGTTCCTGTTAATCAACCTCTGGATTACAAAATTTGTGAAAGATTGACTGATATTCTTAA
CTATGTTGCTCCTTTTACGCTGTGTGGATATGCTGCTTTATAGCCTCTGTATCTAGCTATTGCTTCCCGTACGG
CTTTCGTTTTCTCCTCCTTGTATAAATCCTGGTTGCTGTCTCTTTTAGAGGAGTTGTGGCCCGTTGTCCGTCAA
CGTGGCGTGGTGTGCTCTGTGTTTGCTGACGCAACCCCCACTGGCTGGGGCATTGCCACCACCTGTCAACTCCT
TTCTGGGACTTTCGCTTTCCCCCTCCCGATCGCCACGGCAGAACTCATCGCCGCCTGCCTTGCCCGCTGCTGGA
CAGGGGCTAGGTTGCTGGGCACTGATAATTCCGTGGTGTTGTCGGGGAAGCTGACGTCCTTTCGAATTCGATAT
CAAGCTTATCGATACCGTCGACGGTTACCAAGCAGCTATGGAAGCTTATGGACCTCAGAGAGGAAGTAACGAGG
AGAGGGTGTGGTGGAATGCCACTAGAAACCAGGGAAAACAAGGAGGAGAGTATTACAGGGAAGGAGGTGAAGAA
CCTCATTACCCAAATACTCCTGCTCCTCATAGACGTACCTGGGATGAGAGACACAAGGTTCTTAAATTGTCCTC
ATTCGCTACTCCCTCTGACATCCAACGCTGGGCTACTAACTCTAGATTGTACGGGAGCTCTCTTCACTACTCGC
TGCGTCGAGAGTGTACGAGACTCTCCAGGTTTGGTAAGAAATATTTTATATTGTTATAATGTTACTATGATCCA
TTAACACTCTGCTTATAGATTGTAAGGGTGATTGCAATGCTTTCTGCATAAAACTTTGGTTTTCTTGTTAATCA
ATAAACCGACTTGATTCGAGAACCTACTCATATATTATTGTCTCTTTTATACTTTATTAAGTAAAAGGATTTGT
ATATTAGCCTTGCTAAGGGAGACATCTAGTGATATAAGTGTGAACTACACTTATCTTAAATGATGTAACTCCTT
AGGATAATCAATATACAAAATTCCATGACAATTGGCGATACCCAGCTGCGCTCTTCCGCTTCCTCGCTCACTGA
CTCGCTGCGCTCGGTCGTTCGGCTGCGGCGAGCGGTATCAGCTCACTCAAAGGCGGTAATACGGTTATCCACAG
AATCAGGGGATAACGCAGGAAAGAACATGTGAGCAAAAGGCCAGCAAAAGGCCAGGAACCGTAAAAAGGCCGCG
TTGCTGGCGTTTTTCCATAGGCTCCGCCCCCCTGACGAGCATCACAAAAATCGACGCTCAAGTCAGAGGTGGCG
AAACCCGACAGGACTATAAAGATACCAGGCGTTTCCCCCTGGAAGCTCCCTCGTGCGCTCTCCTGTTCCGACCC
TGCCGCTTACCGGATACCTGTCCGCCTTTCTCCCTTCGGGAAGCGTGGCGCTTTCTCATAGCTCACGCTGTAGG
TATCTCAGTTCGGTGTAGGTCGTTCGCTCCAAGCTGGGCTGTGTGCACGAACCCCCCGTTCAGCCCGACCGCTG
CGCCTTATCCGGTAACTATCGTCTTGAGTCCAACCCGGTAAGACACGACTTATCGCCACTGGCAGCAGCCACTG
GTAACAGGATTAGCAGAGCGAGGTATGTAGGCGGTGCTACAGAGTTCTTGAAGTGGTGGCCTAACTACGGCTAC
ACTAGAAGAACAGTATTTGGTATCTGCGCTCTGCTGAAGCCAGTTACCTTCGGAAAAAGAGTTGGTAGCTCTTG
ATCCGGCAAACAAACCACCGCTGGTAGCGGTGGTTTTTTTGTTTGCAAGCAGCAGATTACGCGCAGAAAAAAAG
GATCTCAAGAAGATCCTTTGATCTTTTCTACGGGGTCTGACGCTCAGTGGAACGAAAACTCACGTTAAGGGATT
TTGGTCATGAGATTATCAAAAAGGATCTTCACCTAGATCCTTTTAAATTAAAAATGAAGTTTTAAATCAATCTA
AAGTATATATGAGTAAACTTGGTCTGACAGTTACCAATGCTTAATCAGTGAGGCACCTATCTCAGCGATCTGTC
TATTTCGTTCATCCATAGTTGCCTGACTCCCCGTCGTGTAGATAACTACGATACGGGAGGGCTTACCATCTGGC
CCCAGTGCTGCAATGATACCGCGAGACCCACGCTCACCGGCTCCAGATTTATCAGCAATAAACCAGCCAGCCGG
AAGGGCCGAGCGCAGAAGTGGTCCTGCAACTTTATCCGCCTCCATCCAGTCTATTAATTGTTGCCGGGAAGCTA
GAGTAAGTAGTTCGCCAGTTAATAGTTTGCGCAACGTTGTTGCCATTGCTACAGGCATCGTGGTGTCACGCTCG
TCGTTTGGTATGGCTTCATTCAGCTCCGGTTCCCAACGATCAAGGCGAGTTACATGATCCCCCATGTTGTGCAA
AAAAGCGGTTAGCTCCTTCGGTCCTCCGATCGTTGTCAGAAGTAAGTTGGCCGCAGTGTTATCACTCATGGTTA
TGGCAGCACTGCATAATTCTCTTACTGTCATGCCATCCGTAAGATGCTTTTCTGTGACTGGTGAGTACTCAACC
AAGTCATTCTGAGAATAGTGTATGCGGCGACCGAGTTGCTCTTGCCCGGCGTCAATACGGGATAATACCGCGCC
ACATAGCAGAACTTTAAAAGTGCTCATCATTGGAAAACGTTCTTCGGGGCGAAAACTCTCAAGGATCTTACCGC
TGTTGAGATCCAGTTCGATGTAACCCACTCGTGCACCCAACTGATCTTCAGCATCTTTTACTTTCACCAGCGTT
TCTGGGTGAGCAAAAACAGGAAGGCAAAATGCCGCAAAAAAGGGAATAAGGGCGACACGGAAATGTTGAATACT
CATACTCTTCCTTTTTCAATATTATTGAAGCATTTATCAGGGTTATTGTCTCATGAGCGGATACATATTTGAAT
GTATTTAGAAAAATAAACAAATAGGGGTTCCGCGCACATTTCCCCGAAAAGTGCCACCTGACGTCTAAGAAACC
ATTATTATCATGACATTAACCTATAAAAATAGGCGTATCACGAGGCCCTTTCGTC (SEQ ID NO: 166)
LTG 1906 EF1a-VH-4 CD33-CD8 TM-41BB-CD3 zeta
MLLLVTSLLLCELPHPAFLLIPEVQLVESGGGLVQPGGSLRLSCAASGFTFSSYGMSWVRQAPRQGLEWVANIK
QDGSEKYYADSVKGRFTISRDNSKNTLYLQMNSLRAEDTATYYCAKENVDWGQGTLVTVSSAAATTTPAPRPPT
PAPTIASQPLSLRPEACRPAAGGAVHTRGLDFACDIYIWAPLAGTCGVLLLSLVITLYCKRGRKKLLYIFKQPF
MRPVQTTQEEDGCSCRFPEEEEGGCELRVKFSRSADAPAYQQGQNQLYNELNLGRREEYDVLDKRRGRDPEMGG
KPRRKNPQEGLYNELQKDKMAEAYSEIGMKGERRRGKGHDGLYQGLSTATKDTYDALHMQALPPR (SEQ ID
NO: 167)
LTG 1905 EF1a VH-2 CD33-CD8 TM-41BB-CD3 zeta
MLLLVTSLLLCELPHPAFLLIPEVQLVESGGGLVQPGGSLRLSCAASGFTFSSYGMSWVRQAPRKGLEWIGEIN
HSGSTNYNPSLKSRVTISRDNSKNTLYLQMNSLRAEDTATYYCARPLNYYYYYMDVWGKGTTVTVSSAAATTTP
APRPPTPAPTIASQPLSLRPEACRPAAGGAVHTRGLDFACDIYIWAPLAGTCGVLLLSLVITLYCKRGRKKLLY
IFKQPFMRPVQTTQEEDGCSCRFPEEEEGGCELRVKFSRSADAPAYQQGQNQLYNELNLGRREEYDVLDKRRGR
DPEMGGKPRRKNPQEGLYNELQKDKMAEAYSEIGMKGERRRGKGHDGLYQGLSTATKDTYDALHMQALPPR
(SEQ ID NO: 168)
Full length Macaca mulatta
MPLLLLPLLWAGALAMDPRVRLEVQESVTVQEGLCVLVPCTFFHPVPYHTRNSPVHGYWFREGAIVSLDSPVAT
NKLDQEVREETQGRFRLLGDPSRNNCSLSIVDTRRRDNGSYFFRMEKGSTKYSYKSTQLSVHVTDLTHRPQILI
PGALDPDHSKNLTCSVPWACEQGTPPIFSWMSAAPTSLGLRTTHSSVLIITPRPQDHGTNLTCQVKFPGAGVTT
ERTIQLNVSYASQNPRTDIFLGDGSGKQGVVQGAIGGAGVTVLLALCLCLIFFTVKTHRRKAARTAVGRIDTHP
ATGPTSSKHQKKSKLHGATETSGCSGTTLTVEMDEELHYASLNEHGMNPSEDTSTEYSEVRTQ (SEQ ID
NO: 169)
Full length Macaca fascicularis
MPLLLLPLLWAGALAMDPRVRLEVQESVTVQEGLCVLVPCTFFHPVPYHTRNSPVHGYWFREGAIVSLDSPVAT
NKLDQEVQEETQGRFRLLGDPSRNNCSLSIVDARRRDNGSYFFRMEKGSTKYSYKSTQLSVHVTDLTHRPQILI
PGALDPDHSKNLTCSVPWACEQGTPPIFSWMSAAPTSLGLRTTHSSVLIITPRPQDHGTNLTCQVKFPGAGVTT
ERTIQLNVSYASQNPRTDIFLGDGSGKQGVVQGAIGGAGVTVLLALCLCLIFFTVKTHRRKAARTAVGRIDTHP
ATGPTSSKHQKKSKLHGATETSGCSGTTLTVEMDEELHYASLNFHGMNPSEDTSTEYSEVRTQ (SEQ ID NO:
170)
Full length Mus musculus
MLWPLPLFLLCAGSLAQDLEFQLVAPESVTVEEGLCVHVPCSVFYPSIKLTLGPVTGSWLRKGVSLHEDSPVAT
SDPRQLVQKATQGRFQLLGDPQKHDCSLFIRDAQKNDTGMYFFRVVREPFVRYSYKKSQLSLHVTSLSRTPDII
IPGTLEAGYPSNLTCSVPWACEQGTPPTFSWMSTALTSLSSRTTDSSVLTFTPQPQDHGTKLTCLVTFSGAGVT
VERTIQLNVTRKSGQMRELVLVAVGEATVKLLILGLCLVFLIVMFCRRKTTKLSVHMGCENPIKRQEAITSYNH
CLSPTASDAVTPGCSIHRLISRTPRCTAILRIQDPYRRTHLRNRAVSTLRFPWISWEGSLRSTQRSKCTKLCSP
VKNLCPLWLPVDNSCIPLIPEWVMLLCVSLTLS (SEQ ID NO: 171)
The nucleotide sequence of Helper Vector 2: Ad35E4PS2/WL-ps2:

| | |
|---|---|
| Ad35 1-->178 | Start: 2582 End: 2759 |
| loxP | Start: 2768 End: 2801 |
| Ad35 366-->481 | Start: 2808 End: 2923 |
| loxP | Start: 2924 End: 2957 |
| Ad35 3112-->27435 | Start: 2966 End: 27288 |
| lambda-1 | Start: 27343 End: 29812 (Complementary) |
| BGH polyA | Start: 30126 End: 30340 |
| copGFP | Start: 30365 End: 31030 (Complementary) |
| CMV | Start: 31077 End: 31729 (Complementary) |
| lambda-2 | Start: 31781 End: 33310 |
| Ad35 30544-->31879 | Start: 33371 End: 34706 |
| Ad5E4orf6 | Start: 34702 End: 35816 |
| Ad35 32972 -->34794 | Start: 35814 End: 37636 |

taaacttggcgcgccctgagtgatttttctctggtcccgccgcatccataccgccagttgtttaccctca
caacgttccagtaaccgggcatgttcatcatcagtaacccgtatcgtgagcatcctctctcgtttcatcg
gtatcattacccccatgaacagaaatcccccttacacggaggcatcagtgaccaaacaggaaaaaaccgc
ccttaacatggcccgctttatcagaagccagacattaacgcttctggagaaactcaacgagctggacgcg
gatgaacaggcagacatctgtgaatcgcttcacgaccacgctgatgagctttaccgcagctgcctcgcgc
gtttcggtgatgacggtgaaaacctctgacacatgcagctcccggagacggtcacagcttgtctgtaagc
ggatgccgggagcagacaagcccgtcagggcgcgtcagcgggtgttggcgggtgtcggggcgcagccatg
acccagtcacgtagcgatagcggagtgtatactggcttaactatgcggcatcagagcagattgtactgag
agtgcaccatatgcggtgtgaaataccgcacagatgcgtaaggagaaaataccgcatcaggcgctcttcc
gcttcctcgctcactgactcgctgcgctcggtcgttcggctgcggcgagcggtatcagctcactcaaagg
cggtaatacggttatccacagaatcaggggataacgcaggaaagaacatgtgagcaaaaggccagcaaaa
ggccaggaaccgtaaaaaggccgcgttgctggcgtttttccataggctccgcccccctgacgagcatcac
aaaaatcgacgctcaagtcagaggtggcgaaacccgacaggactataaagataccaggcgtttccccctg
gaagctccctcgtgcgctctcctgttccgaccctgccgcttaccggatacctgtccgcctttctcccttc
gggaagcgtggcgctttctcatagctcacgctgtaggtatctcagttcggtgtaggtcgttcgctccaag
ctgggctgtgtgcacgaaccccccgttcagcccgaccgctgcgccttatccggtaactatcgtcttgagt
ccaacccggtaagacacgacttatcgccactggcagcagccactggtaacaggattagcagagcgaggta
tgtaggcggtgctacagagttcttgaagtggtggcctaactacggctacactagaaggacagtatttggt
atctgcgctctgctgaagccagttaccttcggaaaaagagttggtagctcttgatccggcaaacaaacca
ccgctggtagcggtggtttttttgtttgcaagcagcagattacgcgcagaaaaaaaggatctcaagaaga
tcctttgatcttttctacggggtctgacgctcagtggaacgaaaactcacgttaagggattttggtcatg
agattatcaaaaaggatcttcacctagatccttttaaattaaaaatgaagttttaaatcaatctaaagta
tatatgagtaaacttggtctgacagttaccaatgcttaatcagtgaggcacctatctcagcgatctgtct
atttcgttcatccatagttgcctgactccccgtcgtgtagataactacgatacgggagggcttaccatct
ggccccagtgctgcaatgataccgcgagacccacgctcaccggctccagatttatcagcaataaaccagc
cagccggaagggccgagcgcagaagtggtcctgcaactttatccgcctccatccagtctattaattgttg
ccgggaagctagagtaagtagttcgccagttaatagtttgcgcaacgttgttgccattgctgcaggcatc
gtggtgtcacgctcgtcgtttggtatggcttcattcagctccggttcccaacgatcaaggcgagttacat
gatcccccatgttgtgcaaaaaagcggttagctccttcggtcctccgatcgttgtcagaagtaagttggc
cgcagtgttatcactcatggttatggcagcactgcataattctcttactgtcatgccatccgtaagatgc
ttttctgtgactggtgagtactcaaccaagtcattctgagaatagtgtatgcggcgaccgagttgctctt
gcccggcgtcaacacgggataataccgcgccacatagcagaactttaaaagtgctcatcattggaaaacg
ttcttcggggcgaaaactctcaaggatcttaccgctgttgagatccagttcgatgtaacccactcgtgca
cccaactgatcttcagcatcttttactttcaccagcgtttctgggtgagcaaaaacaggaaggcaaaatg
ccgcaaaaaagggaataagggcgacacggaaatgttgaatactcatactcttcctttttcaatattattg
aagcatttatcagggttattgtctcatgagcggatacatatttgaatgtatttagaaaaataaacaaata
ggggttccgcgcacatttccccgaaaagtgccacctgtctagctacgatatcctgtttaaacatcatcaa
taatataccttatagatggaatggtgccaatatgtaaatgaggtgattttaaaaagtgtgggccgtgtgg
tgattggctgtggggttaacggttaaaaggggcggcgcggccgtgggaaaatgacgttttatgggggtgg
agtttttttgcaagttgtcgcgggaaatgatttaaatataacttcgtatagcatacattatacgaagtta
tggatcctagactttgacccattacgtggaggtttcgattaccgtgttttttacctgaatttccgcgtac
cgtgtcaaagtcttctgtttttacgtaggtgtcagctgatcgctagggtatttataacttcgtatagcat
acattatacgaagttatatttaaataggaatgtttatgccttaccagtgtaacatgaatcatgtgaaagt
gttgttggaaccagatgccttttccagaatgagcctaacaggaatctttgacatgaacacgcaaatctgg
aagatcctgaggtatgatgatacgagatcgagggtgcgcgcatgcgaatgcggaggcaagcatgccaggt
tccagccggtgtgtgtagatgtgaccgaagatctcagaccggatcatttggttattgcccgcactggagc
agagttcggatccagtggagaagaaactgactaaggtgagtattgggaaaactttggggtgggattttca
gatggacagattgagtaaaaatttgttttttctgtcttgcagctgacatgagtggaaatgcttcttttaa
ggggggagtcttcagcccttatctgacagggcgtctcccatcctgggcaggagttcgtcagaatgttatg
ggatctactgtggatggaagacccgttcaacccgccaattcttcaacgctgacctatgctactttaagtt
cttcacctttggacgcagctgcagccgctgccgccgcctctgtcgccgctaacactgtgcttggaatggg
ttactatggaagcatcgtggctaattccacttcctctaataacccttctacactgactcaggacaagtta
cttgtccttttggcccagctggaggctttgacccaacgtctgggtgaactttctcagcaggtggccgagt
tgcgagtacaaactgagtctgctgtcggcacggcaaagtctaaataaaaaaaattccagaatcaatgaat
aaataaacgagcttgttgttgatttaaaatcaagtgtttttatttcatttttcgcgcacggtatgccctg
gaccaccgatctcgatcattgagaactcggtggattttttccagaatcctatagaggtgggattgaatgt
ttagatacatgggcattaggccgtctttggggtggagatagctccattgaagggattcatgctccggggt
agtgttgtaaatcacccagtcataacaaggtcgcagtgcatggtgttgcacaatatcttttagaagtagg
ctgattgccacagataagcccttggtgtaggtgtttacaaaccggttgagctgggaggggtgcattcgag
gtgaaattatgtgcattttggattggatttttaagttggcaatattgccgccaagatcccgtcttgggtt
catgttatgaaggactaccaagacggtgtatccggtacatttaggaaatttatcgtgcagcttggatgga
aaagcgtggaaaaatttggagacacccttgtgtcctccgagattttccatgcactcatccatgataatag
caatggggccgtgggcagcggcgcgggcaaacacgttccgtgggtctgacacatcatagttatgttcctg
agttaaatcatcataagccattttaatgaatttggggcggagcgtaccagattggggtatgaatgttcct
tcgggccccggagcatagttcccctcacagatttgcatttcccaagctttcagttctgagggtggaatca
tgtccacctggggggctatgaagaacaccgtttcgggggcgggggtgattagttgggatgatagcaagtt
tctgagcaattgagatttgccacatccggtggggccataaataattccgattacaggttgcaggtggtag
tttagggaacggcaactgccgtcttctcgaagcaagggggccacctcgttcatcatttcccttacatgca
tattttcccgcaccaaatccattaggaggcgctctcctcctagtgatagaagttcttgtagtgaggaaaa
gtttttcagcggttttagaccgtcagecatgggcattttggaaagagtttgetgcaaaagttctagtctg
ttccacagttcagtgatgtgttctatggcatctcgatccagcagacctcctcgtttcgcgggtttggacg
gctcctggagtagggtatgagacgatgggcgtccagcgctgccagggttcggtccttccagggtctcagt
gttcgagtcagggttgtttccgtcacagtgaaggggtgtgcgcctgcttgggcgcttgccagggtgcgct
tcagactcattctgctggtggagaacttctgtcgcttggcgccctgtatgtcggccaagtagcagtttac
catgagttcgtagttgagcgcctcggctgcgtggcctttggcgcggagcttacctttggaagttttcttg
cataccgggcagtataggcatttcagcgcatacagcttgggcgcaaggaaaatggattctggggagtatg
catccgcgccgcaggaggcgcaaacagtttcacattccaccagecaggttaaatccggttcattggggtc
aaaaacaagttttccgccatattttttgatgcgtttcttacctttggtctccataagttcgtgtcctcgt
tgagtgacaaacaggctgtccgtatctccgtagactgattttacaggcctcttctccagtggagtgcctc
ggtcttcttcgtacaggaactctgaccactctgatacaaaggcgcgcgtccaggccagcacaaaggaggc
tatgtgggaggggtagcgatcgttgtcaaccagggggtccaccttttccaaagtatgcaaacacatgtca
ccctcttcaacatccaggaatgtgattggcttgtaggtgtatttcacgtgacctggggtccccgctgggg
gggtataaaagggggcggttctttgctcttcctcactgtcttccggatcgctgtccaggaacgtcagctg
ttggggtaggtattccctctcgaaggcgggcatgacctctgcactcaggttgtcagtttctaagaacgag
gaggatttgatattgacagtgccggttgagatgcctttcatgaggttttcgtccatttggtcagaaaaca
caatttttttattgtcaagtttggtggcaaatgatccatacagggcgttggataaaagtttggcaatgga
tcgcatggtttggttcttttccttgtccgcgcgctctttggcggcgatgttgagttggacatactcgcgt
gccaggcacttccattcggggaagatagttgttaattcatctggcacgattctcacttgccaccctcgat
tatgcaaggtaattaaatccacactggtggccacctcgcctcgaaggggttcattggtccaacagagcct
acctcctttcctagaacagaaagggggaagtgggtctagcataagttcatcgggagggtctgcatccatg
gtaaagattcccggaagtaaatccttatcaaaatagctgatgggagtggggtcatctaaggccatttgcc
attctcgagctgccagtgcgcgctcatatgggttaaggggactgccccagggcatgggatgggtgagagc
agaggcatacatgccacagatgtcatagacgtagatgggatcctcaaagatgcctatgtaggttggatag
catcgcccccctctgatacttgctcgcacatagtcatatagttcatgtgatggcgctagcagccccggac
ccaagttggtgcgattgggtttttctgttctgtagacgatctggcgaaagatggcgtgagaattggaaga
gatggtgggtctttgaaaaatgttgaaatgggcatgaggtagacctacagagtctctgacaaagtgggca
taagattcttgaagcttggttaccagttcggcggtgacaagtacgtctagggcgcagtagtcaagtgttt
cttgaatgatgtcataacctggttggtttttcttttcccacagttcgcggttgagaaggtattcttcgcg
atccttccagtactcttctagcggaaacccgtctttgtctgcacggtaagatcctagcatgtagaactga
ttaactgccttgtaagggcagcagcccttctctacgggtagagagtatgcttgagcagcttttcgtagcg
aagcgtgagtaagggcaaaggtgtctctgaccatgactttgagaaattggtatttgaagtccatgtcgtc
acaggctccctgttcccagagttggaagtctacccgtttcttgtaggcggggttgggcaaagcgaaagta
acatcattgaagagaatcttaccggctctgggcataaaattgcgagtgatgcggaaaggctgtggtactt
ccgctcgattgttgatcacctgggcagctaggacgatttcgtcgaaaccgttgatgttgtgtcctacgat
gtataattctatgaaacgcggcgtgcctctgacgtgaggtagcttactgagctcatcaaaggttaggtct
gtggggtcagataaggcgtagtgttcgagagcccattcgtgcaggtgaggatttgcatgtaggaatgatg
accaaagatctaccgccagtgctgtttgtaactggtcccgatactgacgaaaatgccggccaattgccat
tttttctggagtgacacagtagaaggttctggggtcttgttgccatcgatcccacttgagtttaatggct
agatcgtgggccatgttgacgagacgctcttctcctgagagtttcatgaccagcatgaaaggaactagtt
gtttgccaaaggatcccatccaggtgtaagtttccacatcgtaggtcaggaagagtctttctgtgcgagg
atgagagccgatcgggaagaactggatttcctgccaccagttggaggattggctgttgatgtgatggaag
tagaagtttctgcggcgcgccgagcattcgtgtttgtgcttgtacagacggccgcagtagtcgcagcgtt
gcacgggttgtatctcgtgaatgagctgtacctggcttcccttgacgagaaatttcagtgggaagccgag
gcctggcgattgtatctcgtgctcttctatattcgctgtatcggcctgttcatcttctgtttcgatggtg
gtcatgctgacgagcccccgcgggaggcaagtccagacctcggcgcgggaggggcggagctgaaggacga
gagcgcgcaggctggagctgtccagagtcctgagacgctgcggactcaggttagtaggtagggacagaag
attaacttgcatgatcttttccagggcgtgcgggaggttcagatggtacttgatttccacaggttcgttt
gtagagacgtcaatggcttgcagggttccgtgtcctttgggcgccactaccgtacctttgttttttcttt
tgatcggtggtggctctcttgcttcttgcatgctcagaagcggtgacggggacgcgcgccgggcggcagc
ggttgttccggacccgggggcatggctggtagtggcacgtcggcgccgcgcacgggcaggttctggtatt
gcgctctgagaagacttgcgtgcgccaccacgcgtcgattgacgtcttgtatctgacgtctctgggtgaa
agctaccggccccgtgagcttgaacctgaaagagagttcaacagaatcaatttcggtatcgttaacggca
gcttgtctcagtatttcttgtacgtcaccagagttgtcctggtaggcgatctccgccatgaactgctcga
tttcttcctcctgaagatctccgcgacccgctctttcgacggtggccgcgaggtcattggagatacggcc
catgagttgggagaatgcattcatgcccgcctcgttccagacgcggctgtaaaccacggccccctcggag
tctcttgcgcgcatcaccacctgagcgaggttaagctccacgtgtctggttaagaccgcatagttgcata
ggcgctgaaaaaggtagttgagtgtggtggcaatgtgttcggcgacgaagaaatacatgatccatcgtct
cagcggcatttcgctaacatcgcccagagcttccaagcgctccatggcctcgtagaagtccacggcaaaa
ttaaaaaactgggagtttcgcgcggacacggtcaattcctcctcgagaagacggatgagttcggctatgg
tggcccgtacttcgcgttcgaaggctcccgggatctcttcttcctcttctatctcttcttccactaacat
ctcttcttcgtcttcaggcgggggcggagggggcacgcggcgacgtcgacggcgcacgggcaaacggtcg
atgaatcgttcaatgacctctccgcggcggcggcgcatggtttcagtgacggcgcggccgttctcgcgcg
gtcgcagagtaaaaacaccgccgcgcatctccttaaagtggtgactgggaggttctccgtttgggaggga
gagggcgctgattatacattttattaattggcccgtagggactgcgcgcagagatctgatcgtgtcaaga
tccacgggatctgaaaacctttcgacgaaagcgtctaaccagtcacagtcacaaggtaggctgagtacgg
cttcttgtgggcgggggtggttatgtgttcggtctgggtcttctgtttcttcttcatctcgggaaggtga
gacgatgctgctggtgatgaaattaaagtaggcagttctaagacggcggatggtggcgaggagcaccagg
tctttgggtccggcttgctggatacgcaggcgattggccattccccaagcattatcctgacatctagcaa
gatctttgtagtagtcttgcatgagccgttctacgggcacttcttcctcacccgttctgccatgcatacg
tgtgagtccaaatccgcgcattggttgtaccagtgccaagtcagctacgactctttcggcgaggatggct
tgctgtacttgggtaagggtggcttgaaagtcatcaaaatccacaaagcggtggtaagcccctgtattaa
tggtgtaagcacagttggccatgactgaccagttaactgtctggtgaccagggcgcacgagctcggtgta
tttaaggcgcgaataggcgcgggtgtcaaagatgtaatcgttgcaggtgcgcaccagatactggtaccct
ataagaaaatgcggcggtggttggcggtagagaggccatcgttctgtagctggagcgccaggggcgaggt
cttccaacataaggcggtgatagccgtagatgtacctggacatccaggtgattcctgcggcggtagtaga
agcccgaggaaactcgcgtacgcggttccaaatgttgcgtagcggcatgaagtagttcattgtaggcacg
gtttgaccagtgaggcgcgcgcagtcattgatgctctatagacacggagaaaatgaaagcgttcagcgac
tcgactccgtagcctggaggaacgtgaacgggttgggtcgcggtgtaccccggttcgagacttgtactcg
agccggccggagccgcggctaacgtggtattggcactcccgtctcgacccagcctacaaaaatccaggat
acggaatcgagtcgttttgctggtttccgaatggcagggaagtgagtcctatttttttttttttttgccg
ctcagaatgcatcccgtgctgcgacagatgcgcccccaacaacagcccccctcgcagcagcagcagcagc
aaccacaaaaggctgtccctgcaactactgcaactgccgccgtgagcggtgcgggacagcccgcctatga
tctggacttggaagagggcgaaggactggcacgtctaggtgcgccttcgcccgagcggcatccgcgagtt
caactgaaaaaagattctcgcgaggcgtatgtgccccaacagaacctatttagagacagaagcggcgagg
agccggaggagatgcgagcttcccgctttaacgcgggtcgtgagctgcgtcacggtttggaccgaagacg
agtgttgcgagacgaggatttcgaagttgatgaagtgacagggatcagtcctgccagggcacacgtggct
gcagccaaccttgtatcggcttacgagcagacagtaaaggaagagcgtaacttccaaaagtcttttaata
atcatgtgcgaaccctgattgcccgcgaagaagttacccttggtttgatgcatttgtgggatttgatgga
agctatcattcagaaccctactagcaaacctctgaccgcccagctgtttctggtggtgcaacacagcaga
gacaatgaggctttcagagaggcgctgctgaacatcaccgaacccgaggggagatggttgtatgatctta
tcaacattctacagagtatcatagtgcaggagcggagcctgggcctggccgagaaggtagctgccatcaa
ttactcggttttgagcttgggaaaatattacgctcgcaaaatctacaagactccatacgttcccatagac
aaggaggtgaagatagatgggttctacatgcgcatgacgctcaaggtcttgaccctgagcgatgatcttg
gggtgtatcgcaatgacagaatgcatcgcgcggttagcgccagcaggaggcgcgagttaagcgacaggga
actgatgcacagtttgcaaagagctctgactggagctggaaccgagggtgagaattacttcgacatggga
gctgacttgcagtggcagcctaatcgcagggctctgagcgccgcgacggcaggatgtgagcttccttaca
tagaagaggcggatgaaggcgaggaggaagagggcgagtacttggaagactgatggcacaacccgtgttt
tttgetagatggaacagcaagcaccggatcccgcaatgcgggcggcgctgcagagccagecgtccggcat
taactcctcggacgattggacccaggccatgcaacgtatcatggcgttgacgactcgcaaccccgaagcc
tttagacagcaaccccaggccaaccgtctatcggccatcatggaagctgtagtgccttcccgatctaatc
ccactcatgagaaggtcctggccatcgtgaacgcgttggtggagaacaaagctattcgtccagatgaggc
cggactggtatacaacgctctcttagaacgcgtggctcgctacaacagtagcaatgtgcaaaccaatttg
gaccgtatgataacagatgtacgcgaagccgtgtctcagcgcgaaaggttccagcgtgatgccaacctgg
gttcgctggtggcgttaaatgctttcttgagtactcagcctgctaatgtgccgcgtggtcaacaggatta
tactaactttttaagtgctttgagactgatggtatcagaagtacctcagagcgaagtgtatcagtccggt
cotgattacttctttcagactagcagacagggcttgcagacggtaaatctgagecaagcttttaaaaacc
ttaaaggtttgtggggagtgcatgccccggtaggagaaagagcaaccgtgtctagcttgttaactccgaa
ctcccgcctgttattactgttggtagctcctttcaccgacagcggtagcatcgaccgtaattcctatttg
ggttacctactaaacctgtatcgcgaagccatagggcaaagtcaggtggacgagcagacctatcaagaaa
ttacccaagtcagtcgcgctttgggacaggaagacactggcagtttggaagccactctgaacttcttgct
taccaatcggtctcaaaagatccctcctcaatatgctcttactgcggaggaggagaggatccttagatat
gtgcagcagagcgtgggattgtttctgatgcaagagggggcaactccgactgcagcactggacatgacag
cgcgaaatatggagcccagcatgtatgccagtaaccgacctttcattaacaaactgctggactacttgca
cagagctgccgctatgaactctgattatttcaccaatgccatcttaaacccgcactggctgcccccacct
ggtttctacacgggcgaatatgacatgcccgaccctaatgacggatttctgtgggacgacgtggacagcg
atgttttttcacctctttctgatcatcgcacgtggaaaaaggaaggcggtgatagaatgcattcttctgc
ategetgtccggggtcatgggtgetaccgcggctgageccgagtctgcaagtccttttcctagtctaccc
ttttctctacacagtgtacgtagcagcgaagtgggtagaataagtcgcccgagtttaatgggcgaagagg
agtacctaaacgattccttgctcagaccggcaagagaaaaaaatttcccaaacaatggaatagaaagttt
ggtggataaaatgagtagatggaagacttatgctcaggatcacagagacgagcctgggatcatggggact
acaagtagagcgagccgtagacgccagcgccatgacagacagaggggtcttgtgtgggacgatgaggatt
cggccgatgatagcagcgtgttggacttgggtgggagaggaaggggcaacccgtttgctcatttgcgccc
tegettgggtggtatgttgtgaaaaaaaataaaaaagaaaaactcaccaaggccatggcgacgagcgtac
gttcgttcttctttattatctgtgtctagtataatgaggcgagtcgtgctaggcggagcggtggtgtatc
cggagggtcctcctccttcgtacgagagcgtgatgcagcagcagcaggcgacggcggtgatgcaatcccc
actggaggctccctttgtgcctccgcgatacctggcacctacggagggcagaaacagcattcgttactcg
gaactggcacctcagtacgataccaccaggttgtatctggtggacaacaagtcggcggacattgcttctc
tgaactatcagaatgaccacagcaacttcttgaccacggtggtgcagaacaatgactttacccctacgga
agccagcacccagaccattaactttgatgaacgatcgcggtggggcggtcagctaaagaccatcatgcat
actaacatgccaaacgtgaacgagtatatgtttagtaacaagttcaaagcgcgtgtgatggtgtccagaa
aacctcccgacggtgctgcagttggggatacttatgatcacaagcaggatattttggaatatgagtggtt
cgagtttactttgccagaaggcaacttttcagttactatgactattgatttgatgaacaatgccatcata
gataattacttgaaagtgggtagacagaatggagtgcttgaaagtgacattggtgttaagttcgacacca
ggaacttcaagctgggatgggatcccgaaaccaagttgatcatgcctggagtgtatacgtatgaagcctt
ccatcctgacattgtcttactgcctggctgcggagtggattttaccgagagtcgtttgagcaaccttctt
ggtatcagaaaaaaacagccatttcaagagggttttaagattttgtatgaagatttagaaggtggtaata
ttccggccctcttggatgtagatgcctatgagaacagtaagaaagaacaaaaagccaaaatagaagctgc
tacagctgctgcagaagctaaggcaaacatagttgccagcgactctacaagggttgctaacgctggagag
gtcagaggagacaattttgcgccaacacctgttccgactgcagaatcattattggccgatgtgtctgaag
gaacggacgtgaaactcactattcaacctgtagaaaaagatagtaagaatagaagctataatgtgttgga
agacaaaatcaacacagcctatcgcagttggtatctttcgtacaattatggcgatcccgaaaaaggagtg
cgttcctggacattgctcaccacctcagatgtcacctgcggagcagagcaggtttactggtcgcttccag
acatgatgaaggatcctgtcactttccgctccactagacaagtcagtaactaccctgtggtgggtgcaga
gcttatgcccgtcttctcaaagagcttctacaacgaacaagctgtgtactcccagcagctccgccagtcc
acctcgcttacgcacgtcttcaaccgctttcctgagaaccagattttaatccgtccgccggcgcccacca
ttaccaccgtcagtgaaaacgttcctgctctcacagatcacgggaccctgccgttgcgcagcagtatccg
gggagtccaacgtgtgaccgttactgacgccagacgccgcacctgtccctacgtgtacaaggcactgggc
atagtcgcaccgcgcgtcctttcaagccgcactttctaaaaaaaaaatgtccattcttatctcgcccagt
aataacaccggttggggtctgcgcgctccaagcaagatgtacggaggcgcacgcaaacgttctacccaac
atcccgtgcgtgttcgcggacattttcgcgctccatggggtgccctcaagggccgcactcgcgttcgaac
caccgtcgatgatgtaatcgatcaggtggttgccgacgcccgtaattatactcctactgcgcctacatct
actgtggatgcagttattgacagtgtagtggctgacgctcgcaactatgctcgacgtaagagccggcgaa
ggcgcattgccagacgccaccgagctaccactgccatgcgagccgcaagagctctgctacgaagagctag
acgcgtggggcgaagagccatgcttagggcggccagacgtgcagcttcgggcgccagcgccggcaggtcc
cgcaggcaagcagccgctgtcgcagcggcgactattgccgacatggcccaatcgcgaagaggcaatgtat
actgggtgcgtgacgctgccaccggtcaacgtgtacccgtgcgcacccgtccccctcgcacttagaagat
actgagcagtctccgatgttgtgtcccagcggcgaggatgtccaagcgcaaatacaaggaagaaatgctg
caggttatcgcacctgaagtctacggccaaccgttgaaggatgaaaaaaaaccccgcaaaatcaagcggg
ttaaaaaggacaaaaaagaagaggaagatggcgatgatgggctggcggagtttgtgcgcgagtttgcccc
acggcgacgcgtgcaatggcgtgggcgcaaagttcgacatgtgttgagacctggaacttcggtggtcttt
acacccggcgagcgttcaagcgctacttttaagcgttcctatgatgaggtgtacggggatgatgatattc
ttgagcaggcggctgaccgattaggcgagtttgcttatggcaagcgtagtagaataacttccaaggatga
gacagtgtcaatacccttggatcatggaaatcccacccctagtcttaaaccggtcactttgcagcaagtg
ttacccgtaactccgcgaacaggtgttaaacgcgaaggtgaagatttgtatcccactatgcaactgatgg
tacccaaacgccagaagttggaggacgttttggagaaagtaaaagtggatccagatattcaacctgaggt
taaagtgagacccattaagcaggtagcgcctggtctgggggtacaaactgtagacattaagattcccact
gaaagtatggaagtgcaaactgaacccgcaaagcctactgccacctccactgaagtgcaaacggatccat
ggatgcccatgcctattacaactgacgccgccggtcccactcgaagatcccgacgaaagtacggtccagc
aagtctgttgatgcccaattatgttgtacacccatctattattcctactcctggttaccgaggcactcgc
tactatcgcagccgaaacagtacctcccgccgtcgccgcaagacacctgcaaatcgcagtcgtcgccgta
gacgcacaagcaaaccgactcccggcgccctggtgcggcaagtgtaccgcaatggtagtgcggaaccttt
gacactgccgcgtgcgcgttaccatccgagtatcatcacttaatcaatgttgccgctgcctccttgcaga
tatggccctcacttgtcgccttcgcgttcccatcactggttaccgaggaagaaactcgcgccgtagaaga
gggatgttgggacgcggaatgcgacgctacaggcgacggcgtgctatccgcaagcaattgcggggtggtt
ttttaccagccttaattccaattatcgctgctgcaattggcgcgataccaggcatagcttccgtggcggt
tcaggcctcgcaacgacattgacattggaaaaaaaacgtataaataaaaaaaaatacaatggactctgac
actcctggtcctgtgactatgttttcttagagatggaagacatcaatttttcatccttggctccgcgaca
cggcacgaagccgtacatgggcacctggagcgacatcggcacgagccaactgaacgggggcgccttcaat
tggagcagtatctggagcgggcttaaaaattttggctcaaccataaaaacatacgggaacaaagcttgga
acagcagtacaggacaggcgcttagaaataaacttaaagaccagaacttccaacaaaaagtagtcgatgg
gatagcttccggcatcaatggagtggtagatttggctaaccaggctgtgcagaaaaagataaacagtcgt
ttggacccgccgccagcaaccccaggtgaaatgcaagtggaggaagaaattcctccgccagaaaaacgag
gcgacaagcgtccgcgtcccgatttggaagagacgctggtgacgcgcgtagatgaaccgccttcttatga
ggaagcaacgaagcttggaatgcccaccactagaccgatagccccaatggccaccggggtgatgaaacct
tctcagttgcatcgacccgtcaccttggatttgccccctccccctgctgctactgctgtacccgcttcta
agcctgtcgctgccccgaaaccagtcgccgtagccaggtcacgtcccgggggcgctcctcgtccaaatgc
gcactggcaaaatactctgaacagcatcgtgggtctaggcgtgcaaagtgtaaaacgccgtcgctgcttt
taattaaatatggagtagcgcttaacttgcctatctgtgtatatgtgtcattacacgccgtcacagcagc
agaggaaaaaaggaagaggtcgtgcgtcgacgctgagttactttcaagatggccaccccatcgatgctgc
cccaatgggcatacatgcacatcgccggacaggatgcttcggagtacctgagtccgggtctggtgcagtt
cgcccgcgccacagacacctacttcaatctgggaaataagtttagaaatcccaccgtagcgccgacccac
gatgtgaccaccgaccgtagccagcggctcatgttgcgcttcgtgcccgttgaccgggaggacaatacat
actcttacaaagtgcggtacaccctggccgtgggcgacaacagagtgctggatatggccagcacgttctt
tgacattaggggcgtgttggacagaggtcccagtttcaaaccctattctggtacggcttacaactctctg
gctcctaaaggcgctccaaatgcatctcaatggattgcaaaaggcgtaccaactgcagcagccgcaggca
atggtgaagaagaacatgaaacagaggagaaaactgctacttacacttttgccaatgctcctgtaaaagc
cgaggctcaaattacaaaagagggcttaccaataggtttggagatttcagctgaaaacgaatctaaaccc
atctatgcagataaactttatcagccagaacctcaagtgggagatgaaacttggactgacctagacggaa
aaaccgaagagtatggaggcagggctctaaagcctactactaacatgaaaccctgttacgggtcctatgc
gaagcctactaatttaaaaggtggtcaggcaaaaccgaaaaactcggaaccgtcgagtgaaaaaattgaa
tatgatattgacatggaattttttgataactcatcgcaaagaacaaacttcagtcctaaaattgtcatgt
atgcagaaaatgtaggtttggaaacgccagacactcatgtagtgtacaaacctggaacagaagacacaag
ttccgaagctaatttgggacaacagtctatgcccaacagacccaactacattggcttcagagataacttt
attggactcatgtactataacagtactggtaacatgggggtgctggctggtcaagcgtctcagttaaatg
cagtggttgacttgcaggacagaaacacagaactttcttaccaactcttgcttgactctctgggcgacag
aaccagatactttagcatgtggaatcaggctgtggacagttatgatcctgatgtacgtgttattgaaaat
catggtgtggaagatgaacttcccaactattgttttccactggacggcataggtgttccaacaaccagtt
acaaatcaatagttccaaatggagaagataataataattggaaagaacctgaagtaaatggaacaagtga
gatcggacagggtaatttgtttgccatggaaattaaccttcaagccaatctatggcgaagtttcctttat
tccaatgtggctctgtatctcccagactcgtacaaatacaccccgtccaatgtcactcttccagaaaaca
aaaacacctacgactacatgaacgggcgggtggtgccgccatctctagtagacacctatgtgaacattgg
tgccaggtggtctctggatgccatggacaatgtcaacccattcaaccaccaccgtaacgctggcttgcgt
taccgatctatgcttctgggtaacggacgttatgtgcctttccacatacaagtgcctcaaaaattcttcg
ctgttaaaaacctgctgcttctcccaggctcctacacttatgagtggaactttaggaaggatgtgaacat
ggttctacagagttccctcggtaacgacctgcgggtagatggcgccagcatcagtttcacgagcatcaac
ctctatgctacttttttccccatggctcacaacaccgcttccacccttgaagccatgctgcggaatgaca
ccaatgatcagtcattcaacgactacctatctgcagctaacatgctctaccccattcctgccaatgcaac
caatattcccatttccattccttctcgcaactgggcggctttcagaggctggtcatttaccagactgaaa
accaaagaaactccctctttggggtctggatttgacccctactttgtctattctggttctattccctacc
tggatggtaccttctacctgaaccacacttttaagaaggtttccatcatgtttgactcttcagtgagctg
gcctggaaatgacaggttactatctcctaacgaatttgaaataaagcgcactgtggatggcgaaggctac
aacgtagcccaatgcaacatgaccaaagactggttcttggtacagatgctcgccaactacaacatcggct
atcagggcttctacattccagaaggatacaaagatcgcatgtattcatttttcagaaacttccagcccat
gagcaggcaggtggttgatgaggtcaattacaaagacttcaaggccgtcgccataccctaccaacacaac
aactctggctttgtgggttacatggctccgaccatgcgccaaggtcaaccctatcccgctaactatccct
atccactcattggaacaactgccgtaaatagtgttacgcagaaaaagttcttgtgtgacagaaccatgtg
gcgcataccgttctcgagcaacttcatgtctatgggggcccttacagacttgggacagaatatgctctat
gccaactcagctcatgctctggacatgacctttgaggtggatcccatggatgagcccaccctgctttatc
ttctcttcgaagttttcgacgtggtcagagtgcatcagccacaccgcggcatcatcgaggcagtctacct
gcgtacaccgttctcggccggtaacgctaccacgtaagaagcttcttgcttcttgcaaatagcagctgca
accatggcctgcggatcccaaaacggctccagcgagcaagagctcagagccattgtccaagacctgggtt
gcggaccctattttttgggaacctacgataagcgcttcccggggttcatggcccccgataagctcgcctg
tgccattgtaaatacggccggacgtgagacggggggagagcactggttggctttcggttggaacccacgt
tctaacacctgctacctttttgatccttttggattctcggatgatcgtctcaaacagatttaccagtttg
aatatgagggtctcctgcgccgcagcgctcttgctaccaaggaccgctgtattacgctggaaaaatctac
ccagaccgtgcagggcccccgttctgccgcctgcggacttttctgctgcatgttccttcacgcctttgtg
cactggcctgaccgtcccatggacggaaaccccaccatgaaattgctaactggagtgccaaacaacatgc
ttcattctcctaaagtccagcccaccctgtgtgacaatcaaaaagcactctaccattttcttaataccca
ttcgccttattttcgctctcatcgtacacacatcgaaagggccactgcgttcgaccgtatggatgttcaa
taatgactcatgtaaacaacgtgttcaataaacatcactttatttttttacatgtatcaaggctctggat
tacttatttatttacaagtcgaatgggttctgacgagaatcagaatgacccgcaggcagtgatacgttgc
ggaactgatacttgggttgccacttgaattcgggaatcaccaacttgggaaccggtatatcgggcaggat
gtcactccacagctttctggtcagctgcaaagctccaagcaggtcaggagccgaaatcttgaaatcacaa
ttaggaccagtgctctgagcgcgagagttgcggtacaccggattgcagcactgaaacaccatcagcgacg
gatgtctcacgcttgccagcacggtgggatctgcaatcatgcccacatccagatcttcagcattggcaat
gctgaacggggtcatcttgcaggtctgcctacccatggcgggcacccaattaggcttgtggttgcaatcg
cagtgcagggggatcagtatcatcttggcctgatcctgtctgattcctggatacacggctctcatgaaag
catcatattgcttgaaagcctgctgggctttactaccctcgggataaaacatcccgcaggacctgctcga
aaactggttagcctgcacagccggcatcattcacacagcagcgggcgtcattgttggctatttgcaccac
acttctgccccagcggttttgggtgattttggttcgctcgggattctcctttaaggctcgttgtccgttc
tcgctggccacatccatctcgataatctgctccttctgaatcataatattgccatgcaggcacttcagct
tgccctcataatcattgcagccatgaggccacaacgcacagcctgtacattcccaattatggtgggcgat
ctgagaaaaagaatgtatcattccctgcagaaatcttcccatcatcgtgctcagtgtcttgtgactagtg
aaagttaactggatgcctcggtgctcttcgtttacgtactggtgacagatgcgcttgtattgttcgtgtt
gctcaggcattagtttaaaacaggttctaagttcgttatccagcctgtacttctccatcagcagacacat
cacttccatgcctttctcccaagcagacaccaggggcaagctaatcggattcttaacagtgcaggcagca
gctcctttagccagagggtcatctttagcgatcttctcaatgcttcttttgccatccttctcaacgatgc
gcacgggcgggtagctgaaacccactgctacaagttgcgcctcttctctttcttcttcgctgtcttgact
gatgtcttgcatggggatatgtttggtcttccttggcttctttttggggggtatcggaggaggaggactg
tcgctccgttccggagacagggaggattgtgacgtttcgctcaccattaccaactgactgtcggtagaag
aacctgaccccacacggcgacaggtgtttttcttcgggggcagaggtggaggcgattgcgaagggctgcg
gtccgacctggaaggcggatgactggcagaaccccttccgcgttcgggggtgtgctccctgtggcggtcg
cttaactgatttccttcgcggctggccattgtgttctcctaggcagagaaacaacagacatggaaactca
gccattgctgtcaacatcgccacgagtgccatcacatctcgtcctcagcgacgaggaaaaggagcagagc
ttaagcattccaccgcccagtcctgccaccacctctaccctagaagataaggaggtcgacgcatctcatg
acatgcagaataaaaaagcgaaagagtctgagacagacatcgagcaagacccgggctatgtgacaccggt
ggaacacgaggaagagttgaaacgctttctagagagagaggatgaaaactgcccaaaacagcgagcagat
aactatcaccaagatgctggaaatagggatcagaacaccgactacctcatagggcttgacggggaagacg
cgctccttaaacatctagcaagacagtcgctcatagtcaaggatgcattattggacagaactgaagtgcc
catcagtgtggaagagctcagctgcgcctacgagcttaaccttttttcacctcgtactccccccaaacgt
cagccaaacggcacctgcgagccaaatcctcgcttaaacttttatccagcttttgctgtgccagaagtac
tggctacctatcacatcttttttaaaaatcaaaaaattccagtctcctgccgcgctaatcgcacccgcgc
cgatgccctactcaatctgggacctggttcacgcttacctgatatagcttccttggaagaggttccaaag
atcttcgagggtctgggcaataatgagactcgggccgcaaatgctctgcaaaagggagaaaatggcatgg
atgagcatcacagcgttctggtggaattggaaggcgataatgccagactcgcagtactcaagcgaagcgt
cgaggtcacacacttcgcatatcccgctgtcaacctgccccctaaagtcatgacggcggtcatggaccag
ttactcattaagcgcgcaagtcccctttcagaagacatgcatgacccagatgcctgtgatgagggtaaac
cagtggtcagtgatgagcagctaacccgatggctgggcaccgactctccccgggatttggaagagcgtcg
caagcttatgatggccgtggtgctggttaccgtagaactagagtgtctccgacgtttctttaccgattca
gaaaccttgcgcaaactcgaagagaatctgcactacacttttagacacggctttgtgcggcaggcatgca
agatatctaacgtggaactcaccaacctggtttcctacatgggtattctgcatgagaatcgcctaggaca
aagcgtgctgcacagcacccttaagggggaagcccgccgtgattacatccgcgattgtgtctatctctac
ctgtgccacacgtggcaaaccggcatgggtgtatggcagcaatgtttagaagaacagaacttgaaagagc
ttgacaagctcttacagaaatctcttaaggttctgtggacagggttcgacgagcgcaccgtcgcttccga
cctggcagacctcatcttcccagagcgtctcagggttactttgcgaaacggattgcctgactttatgagc
cagagcatgcttaacaattttcgctctttcatcctggaacgctccggtatcctgcccgccacctgctgcg
cactgccctccgactttgtgcctctcacctaccgcgagtgccccccgccgctatggagtcactgctacct
gttccgtctggccaactatctctcctaccactcggatgtgatcgaggatgtgagcggagacggcttgctg
gagtgccactgccgctgcaatctgtgcacgccccaccggtccctagcttgcaacccccagttgatgagcg
aaacccagataataggcacctttgaattgcaaggccccagcagccaaggcgatgggtcttctcctgggca
aagtttaaaactgaccccgggactgtggacctccgcctacttgcgcaagtttgctccggaagattaccac
ccctatgaaatcaagttctatgaggaccaatcacagcctccaaaggccgaactttcggcttgcgtcatca
cccagggggcaattctggcccaattgcaagccatccaaaaatcccgccaagaatttctactgaaaaaggg
taagggggtctaccttgacccccagaccggcgaggaactcaacacaaggttccctcaggatgtcccaacg
acgagaaaacaagaagttgaaggtgcagccgccgcccccagaagatatggaggaagattgggacagtcag
gcagaggaggcggaggaggacagtctggaggacagtctggaggaagacagtttggaggaggaaaacgagg
aggcagaggaggtggaagaagtaaccgccgacaaacagttatcctcggctgcggagacaagcaacagcgc
taccatctccgctccgagtcgaggaacccggcggcgtcccagcagtagatgggacgagaccggacgcttc
ccgaacccaaccagcgcttccaagaccggtaagaaggatcggcagggatacaagtcctggcgggggcata
agaatgccatcatctcctgcttgcatgagtgcgggggcaacatatccttcacgcggcgctacttgctatt
ccaccatggggtgaactttccgcgcaatgttttgcattactaccgtcacctccacagcccctactatagc
cagcaaatcccgacagtctcgacagataaagacagcggcggcgacctccaacagaaaaccagcagcggca
gttagaaaatacacaacaagtgcagcaacaggaggattaaagattacagccaacgagccagcgcaaaccc
gagagttaagaaatcggatctttccaaccctgtatgccatcttccagcagagtcggggtcaagagcagga
actgaaaataaaaaaccgatctctgcgttcgctcaccagaagttgtttgtatcacaagagcgaagatcaa
cttcagcgcactctcgaggacgccgaggctctcttcaacaagtactgcgcgctgactcttaaagagtagg
cagcgaccgcgcttattcaaaaaaggcgggaattacatcatcctcgacatgagtaaagaaattcccacgc
cttacatgtggagttatcaaccccaaatgggattggcagcaggcgcctcccaggactactccacccgcat
gaattggctcagcgccgggccttctatgatttctcgagttaatgatatacgcgcctaccgaaaccaaata
cttttggaacagtcagctcttaccaccacgccccgccaacaccttaatcccagaaattggcccgccgccc
tagtgtaccaggaaagtcccgctcccaccactgtattacttcctcgagacgcccaggccgaagtccaaat
gactaatgcaggtgcgcagttagctggcggctccaccctatgtcgtcacaggcctcggcataatataaaa
cgcctgatgatcagaggccgaggtatccagctcaacgacgagtcggtgagctctccgcttggtctacgac
cagacggaatctttcagattgccggctgcgggagatcttccttcacccctcgtcaggctgttctgacttt
ggaaagttcgtcttcgcaaccccgctcgggcggaatcgggaccgttcaatttgtagaggagtttactccc
tctgtctacttcaaccccttctccggatctcctgggcactacccggacgagttcataccgaacttcgacg
cgattagcgagtcagtggacggctacgattgatgtctggtgacgcggctgagctatctcggctgcgacat
ctagaccactgccgccgctttcgctgctttgcccgggaacttattgagttcatctacttcgaactcccca
aggatcaccctcaaggtccggcccacggagtgcggattactatcgaaggcaaaatagactctcgcctgca
acgaattttctcccagcggcccgtgctgatcgagcgagaccagggaaacaccacggttagtaatcaatta
cggggtcattagttcatagcccatatatggagttgcgatcgctgcgggccatgtcatacaccgccttcag
agcagccggacctatctgcccgttcgtgccgtcgttgttaatcaccacatggttattctgctcaaacgtc
ccggacgcctgcgaccggctgtctgccatgctgcccggtgtaccgacataaccgccggtggcatagccgc
gcatcagccggtaaagattccccacgccaatccggctggttgcctccttcgtgaagacaaactcaccacg
gtgaacaatccccgctggctcatatttgccgccggttcccgtaaatcctccggttgcaaaatggaatttc
gccgcagcggcctgaatggctgtaccgcctgacgcggatgcgccgccaccaacagccccgccaatggcgc
tgccgatactcccgacaatccccaccattgcctgcttaagcagaatttctgtcatcatggacagcacgga
acgggtgaagctgcgccagttctgctcactgccggtcagcatcgccgccatattctgtgcaataccatca
aaggtctgcgtggctgcactttttacctgcgacatactgtccgtggcgctctcttcccactcactccagc
cggacttcaggcctgccatccagttcccgcgaagctggtcttcagccgcccaggtctttttctgctctga
catgacgttattcagcgccagcggattatcgccatactgttccttcaggcgctgttccgtggcttcccgt
tctgcctgccggtcagtcagcccccggcttttcgcatcaatggcggcccgttttgcccgttgctgctgtg
cgaatttatccgcctgctgcgccagcgcgttcaggcgctcctgatacgtaaccttgtcgccaagtgcagc
cagctggcgtttgtactccagcgtctcatctttatgcgccagcagggatttctcctgtgcagacagctgg
cgacgttgcgccgcctcctccagtaccgcgaactgactctccgccttccacaaatcccggcgctgctggc
tgattttctcatttgctccggcatgcttctccagcgtccggagttctgcctgaagcgtcagcagggcagc
atgagcactgtcttcctgacgatcgcccgcagacaccttcacgctggactgtttcggctttttcagcgtc
gcttcataatcctttttcgccgccgccatcagcgtgttgtaatccgcctgcaggattttcccgtctttca
gtgccttgttcagttcttcctgacgggcggtatatttctccagcggcgtctgcagccgttcgtaagcctt
ctgcgcctcttcggtatatttcagccgtgacgcttcggtatcgctctgctgctgcgcatttttgtcctgt
tgagtctgctgctcagccttctttcgggcggcttcaagcgcaagacgggccttttcacgatcatcccagt
aacgcgcccgcgcttcatcgttaacaaaataatcatccttgcgcagattccagatgtcgtctgctttctt
atacgcagcctctgccttaatcagcatctcctgcgcggtatcaggacgaccaatatccagcaccgcatcc
cacatggatttgaatgcccgcgcagtcctgtctgcccaggtctccagcgtgcccatgttctctttcaggc
ggcgggtctggtcatcaaaccctttcgttgcggcctcgttcgccgcctgcaatgccccggcttcatcgcc
ggaacgctgcaactgagcaacatacgcaatctgctccgccgacacgttatggaactggcgagccatcgcc
gtcagccccgacgtcgggtctgtggtcagcttcccgaaggcttcagcgaccttgtccacctccacgccgg
atgcagaggagaaacgcgccacactctggctgatggacgcaatctgagcctcaccgcttacccccgcctt
aaccagtgcgctgagtgactcgctggtctggttaaacgtcagccctgccgcctgcccggctctggacagg
accagcatacgatctgccgtcagtcccgcctgattgccggaaaggaccagcgttttgttgaaatcggaca
gggttgagttgccctgataccaggcatacgccagcgcaccggtcgccaccgccagcgaggtggcccccac
catcggcagggtgatcgcaccggcaagccccctgaacatggggatcatcccgccgaaggagtccttcacc
tgccccccctgttgcagcaggatcagccacggactttgcccgcctgcaagctgcgtggccacgtcggtga
actgtgcaggcagcatacgcatggcggctttatactgcccgacggaaatccccgctttctgtgcagccag
cgcctgtcggctcagcgactgttcaacgactgccgctgtttttttcgcatcactttccgtaccagaaaaa
tgacgcctgactctggccatctgctcgtcaaatctggccgcatccagactcaaatcaacgacgtcgacta
agctctagcatttgtgaaccatcaccctaatcaagttttttggggtcgaggtgccgtaaagcactaaatc
ggaaccctaaagggagcccccgatttagagcttgacggggaaagccggcgaacgtggcgagaaaggaagg
gaagaaagcgaaaggagcgggcgctagggcgctggcaagtgtagcggtcacgctgcgcgtaaccaccaca
cccgccgcgcttaatgcgccgctacagggcgcgtggggataccccctagagccccagctggttctttccg
cctcagaagccatagagcccaccgcatccccagcatgcctgctattgtcttcccaatcctcccccttgct
gtcctgccccaccccaccccccagaatagaatgacacctactcagacaatgcgatgcaatttcctcattt
tattaggaaaggacagtgggagtggcaccttccagggtcaaggaaggcacgggggaggggcaaacaacag
atggctggcaactagaaggcacagtcgaggctgatcagcgggtttgctagcttaggcgaaggcgatgggg
gtcttgaaggcgtgctggtactccacgatgcccagctcggtgttgctgtgcagctcctccacgcggcgga
aggcgaacatggggcccccgttctgcaggatgctggggtggatggcgctcttgaagtgcatgtggctgtc
caccacgaagctgtagtagccgccgtcgcgcaggctgaaggtgcgggcgaagctgcccaccagcacgtta
tcgcccatggggtgcaggtgctccacggtggcgttgctgcggatgatcttgtcggtgaagatcacgctgt
cctcggggaagccggtgcccaccaccttgaagtcgccgatcacgcggccggcctcgtagcggtagctgaa
gctcacgtgcagcacgccgccgtcctcgtacttctcgatgcgggtgttggtgtagccgccgttgttgatg
gcgtgcaggaaggggttctcgtagccgctggggtaggtgccgaagtggtagaagccgtagcccatcacgt
ggctcagcaggtaggggctgaaggtcagggcgcctttggtgctcttcatcttgttggtcatgcggccctg
ctcgggggtgccctctccgccgcccaccagctcgaactccacgccgttcagggtgccggtgatgcggcac
tcgatcttcatggcgggcatggtggctagcctagccagcttgggtctccctatagtgagtcgtattaatt
tcgataagccagtaagcagtgggttctctagttagccagagagctctgcttatatagacctcccaccgta
cacgcctaccgcccatttgcgtcaatggggcggagttgttacgacattttggaaagtcccgttgattttg
gtgccaaaacaaactcccattgacgtcaatggggtggagacttggaaatccccgtgagtcaaaccgctat
ccacgcccattgatgtactgccaaaaccgcatcaccatggtaatagcgatgactaatacgtagatgtact
gccaagtaggaaagtcccataaggtcatgtactgggcataatgccaggcgggccatttaccgtcattgac
gtcaatagggggcgtacttggcatatgatacacttgatgtactgccaagtgggcagtttaccgtaaatac
tccacccattgacgtcaatggaaagtccctattggcgttactatgggaacatacgtcattattgacgtca
atgggcgggggtcgttgggcggtcagccaggcgggccatttaccgtaagttatgtaacgcggaactccat
atatgggctatgaactaatgaccccgtaattgattactattaataactacaataatcaatgtcaacgcgt
atatctggcccgtacatcgcgaagcagcgcaaaacgcctaaccctaagcagattcttcatgcaattaagc
ttcgcggtgcttcttcagtacgctacggcaaatgtcatcgacgtttttatccggaaactgctgtctggct
ttttttgatttcagaattagcctgacgggcaatgctgcgaagggcgttttcctgctgaggtgtcattgaa
caagtcccatgtcggcaagcataagcacacagaatatgaagcccgctgccagaaaaatgcattccgtggt
tgtcatacctggtttctctcatctgcttctgctttcgccaccatcatttccagcttttgtgaaagggatg
cggctaacgtatgaaattcttcgtctgtttctactggtattggcacaaacctgattccaatttgagcaag
gctatgtgccatctcgatactcgttcttaactcaacagaagatgctttgtgcatacagcccctcgtttat
tatttatctcctcagccagccgctgtgctttcagtggatttcggataacagaaaggccgggaaataccca
gcctcgctttgtaacggagtagacgaaagtgattgcgcctacccggatattatcgtgaggatgcgtcatc
gccattgctccccaaatacaaaaccaatttcagccagtgcctcgtccattttttcgatgaactccggcac
gatctcgtcaaaactcgccatgtacttttcatcccgctcaatcacgacataatgcaggccttcacgcttc
atacgcgggtcatagttggcaaagtaccaggcattttttcgcgtcacccacatgctgtactgcacctggg
ccatgtaagctgactttatggcctcgaaaccaccgagccggaacttcatgaaatcccgggaggtaaacgg
gcatttcagttcaaggccgttgccgtcactgcataaaccatcgggagagcaggcggtacgcatactttcg
tcgcgatagatgatcggggattcagtaacattcacgccggaagtgaattcaaacagggttctggcgtcgt
tctcgtactgttttccccaggccagtgctttagcgttaacttccggagccacaccggtgcaaacctcagc
aagcagggtgtggaagtaggacattttcatgtcaggccacttctttccggagcggggttttgctatcacg
ttgtgaacttctgaagcggtgatgacgccgagccgtaatttgtgccacgcatcatccccctgttcgacag
ctctcacatcgatcccggtacgctgcaggataatgtccggtgtcatgctgccaccttctgctctgcggct
ttctgtttcaggaatccaagagcttttactgcttcggcctgtgtcagttctgacgatgcacgaatgtcgc
ggcgaaatatctgggaacagagcggcaataagtcgtcatcccatgttttatccagggcgatcagcagagt
gttaatctcctgcatggtttcatcgttaaccggagtgatgtcgcgttccggctgacgttctgcagtgtat
gcagtattttcgacaatgcgctcggcttcatccttgtcatagataccagcaaatccgaagcggccgcgga
acaacaacaattgcattcattttatgtttcaggttcagggggaggtgtggtcctgcgattccatcgagtg
cacctacaccctgctgaagaccctatgcggcctaagagacctgctaccaatgaattaaaaaaaaatgatt
aataaaaaatcacttacttgaaatcagcaataaggtctctgttgaaattttctcccagcagcacctcact
tccctcttcccaactctggtattctaaaccccgttcagcggcatactttctccatactttaaaggggatg
tcaaattttagctcctctcctgtacccacaatcttcatgtctttcttcccagatgaccaagagagtccgg
ctcagtgactccttcaaccctgtctacccctatgaagatgaaagcacctcccaacaccccttttataacc
cagggtttatttccccaaatggcttcacacaaagcccagacggagttcttactttaaaatgtttaacccc
actaacaaccacaggcggatctctacagctaaaagtgggagggggacttacagtggatgacactgatggt
accttacaagaaaacatacgtgctacagcacccattactaaaaataatcactctgtagaactatccattg
gaaatggattagaaactcaaaacaataaactatgtgccaaattgggaaatgggttaaaatttaacaacgg
tgacatttgtataaaggatagtattaacaccttatggactggaataaaccctccacctaactgtcaaatt
gtggaaaacactaatacaaatgatggcaaacttactttagtattagtaaaaaatggagggcttgttaatg
gctacgtgtctctagttggtgtatcagacactgtgaaccaaatgttcacacaaaagacagcaaacatcca
attaagattatattttgactcttctggaaatctattaactgaggaatcagacttaaaaattccacttaaa
aataaatcttctacagcgaccagtgaaactgtagccagcagcaaagcctttatgccaagtactacagctt
atcccttcaacaccactactagggatagtgaaaactacattcatggaatatgttactacatgactagtta
tgatagaagtctatttcccttgaacatttctataatgctaaacagccgtatgatttcttccaatgttgcc
tatgccatacaatttgaatggaatctaaatgcaagtgaatctccagaaagcaacatagctacgctgacca
catccccctttttcttttcttacattacagaagacgacaactaaaataaagtttaagtgtttttatttaa
aatcacaaaattcgagtagttattttgcctccaccttcccatttgacagaatacacagtcctttctcccc
ggctggccttaaaaagcatcatatcatgggtaacagacatattcttaggtgttatattccacacggtttc
ctgtcgagccaaacgctcatcagtgatattaataaactccccgggcagctcacttaagttcatgtcgctg
tccagctgetgagecacaggctgetgtccaacttgcggttgcttaacgggcggcgaaggagaagtccacg
cctacatgggggtagagtcataatcgtgcatcaggatagggcggtggtgctgcagcagcgcgcgaataaa
ctgctgccgccgccgctccgtcctgcaggaatacaacatggcagtggtctcctcagcgatgattcgcacc
gcccgcagcataaggcgccttgtcctccgggcacagcagcgcaccctgatctcacttaaatcagcacagt
aactgcagcacagcaccacaatattgttcaaaatcccacagtgcaaggcgctgtatccaaagctcatggc
ggggaccacagaacccacgtggccatcataccacaagcgcaggtagattaagtggcgacccctcataaac
acgctggacataaacattacctcttttggcatgttgtaattcaccacctcccggtaccatataaacctct
gattaaacatggcgccatccaccaccatcctaaaccagctggccaaaacctgcccgccggctatacactg
cagggaaccgggactggaacaatgacagtggagagcccaggactcgtaaccatggatcatcatgctcgtc
atgatgtcaatgttggcacaacacaggcacacgtgcatacacttcctcaggattacaagctcctcccgcg
ttagaaccatatcccagggaacaacccattcctgaatcagcgtaaatcccacactgcagggaagacctcg
cacgtaactcacgttgtgcattgtcaaagtgttacattcgggcagcagcggatgatcctccagtatggta
gcgcgggtttctgtctcaaaaggaggtagacgatccctactgtacggagtgcgccgagacaaccgagatc
gtgttggtcgtagtgtcatgccaaatggaacgccggacgtagtcattctcgtattttgtatagcaaaacg
cggccctggcagaacacactcttcttcgccttctatcctgccgcttagcgtgttccgtgtgatagttcaa
gtacagccacactcttaagttggtcaaaagaatgctggcttcagttgtaatcaaaactccatcgcatcta
attgttctgaggaaatcatccacggtagcatatgcaaatcccaaccaagcaatgcaactggattgcgttt
caagcaggagaggagagggaagagacggaagaaccatgttaatttttattccaaacgatctcgcagtact
tcaaattgtagatcgcgcagatggcatctctcgcccccactgtgttggtgaaaaagcacagctaaatcaa
aagaaatgcgattttcaaggtgctcaacggtggcttccaacaaagcctccacgcgcacatccaagaacaa
aagaataccaaaagaaggagcattttctaactcctcaatcatcatattacattcctgcaccattcccaga
taattttcagctttccagccttgaattattcgtgtcagttcttgtggtaaatccaatccacacattacaa
acaggtcccggagggcgccctccaccaccattcttaaacacaccctcataatgacaaaatatcttgctcc
tgtgtcacctgtagcgaattgagaatggcaacatcaattgacatgcccttggctctaagttcttctttaa
gttctagttgtaaaaactctctcatattatcaccaaactgcttagccagaagccccccgggaacaagagc
aggggacgctacagtgcagtacaagcgcagacctccccaattggctccagcaaaaacaagattggaataa
gcatattgggaaccaccagtaatatcatcgaagttgctggaaatataatcaggcagagtttcttgtagaa
attgaataaaagaaaaatttgccaaaaaaacattcaaaacctctgggatgcaaatgcaataggttaccgc
gctgcgctccaacattgttagttttgaattagtctgcaaaaataaaaaaaaaacaagcgtcatatcatag
tagcctgacgaacaggtggataaatcagtctttccatcacaagacaagccacagggtctccagctcgacc
ctcgtaaaacctgtcatcgtgattaaacaacagcaccgaaagttcctcgcggtgaccagcatgaataagt
cttgatgaagcatacaatccagacatgttagcatcagttaaggagaaaaaacagccaacatagcctttgg
gtataattatgcttaatcgtaagtatagcaaagccacccctcgcggatacaaagtaaaaggcacaggaga
ataaaaaatataattatttctctgctgctgtttaggcaacgtcgcccccggtccctctaaatacacatac
aaagcctcatcagccatggcttaccagagaaagtacagcgggcacacaaaccacaagctctaaagtcact
ctccaacctctccacaatatatatacacaagccctaaactgacgtaatgggactaaagtgtaaaaaatcc
cgccaaacccaacacacaccccgaaactgcgtcaccagggaaaagtacagtttcacttccgcaatcccaa
caagcgtcacttcctctttctcacggtacgtcacatcccattaacttacaacgtcattttcccacggccg
cgccgccccttttaaccgttaaccccacagccaatcaccacacggcccacactttttaaaatcacctcat
ttacatattggcaccattccatctataaggtatattattgatgatgtt (SEQ ID NO: 172)
The nucleotide sequence of Helper Vector 3: Ad35E4PS3/WL-ps3:

| | |
|---|---|
| Ad35 1-->154 | Start: 2582 End: 2735 |
| loxP | Start: 2744 End: 2777 |
| Ad35 155-->481 | Start: 2784 End: 3110 |
| loxP | Start: 3111 End: 3144 |
| Ad35 3112-->27435 | Start: 3153 End: 27475 |
| lambda-1 | Start: 27530 End: 29999 (Complementary) |
| BGH polyA | Start: 30313 End: 30527 |
| copGFP | Start: 30552 End: 31217 (Complementary) |
| CMV | Start: 31264 End: 31916 (Complementary) |
| lambda-2 | Start: 31968 End: 33497 |
| Ad35 30544-->31879 | Start: 33558 End: 34893 |
| Ad5E4orf6 | Start: 34889 End: 36003 |
| Ad35 32972-->34794 | Start: 36001 End: 37823 |

taaacttggcgcgccctgagtgatttttctctggtcccgccgcatccataccgccagttgtttaccctca
caacgttccagtaaccgggcatgttcatcatcagtaacccgtatcgtgagcatoctetctegttteateg
gtatcattacccccatgaacagaaatcccccttacacggaggcatcagtgaccaaacaggaaaaaaccgc
ccttaacatggcccgctttatcagaagccagacattaacgcttctggagaaactcaacgagctggacgcg
gatgaacaggcagacatctgtgaatcgcttcacgaccacgctgatgagctttaccgcagctgcctcgcgc
gtttcggtgatgacggtgaaaacctctgacacatgcagctcccggagacggtcacagcttgtctgtaagc
ggatgccgggagcagacaagcccgtcagggcgcgtcagcgggtgttggcgggtgtcggggcgcagccatg
acccagtcacgtagcgatagcggagtgtatactggcttaactatgcggcatcagagcagattgtactgag
agtgcaccatatgcggtgtgaaataccgcacagatgcgtaaggagaaaataccgcatcaggcgctcttcc
gcttcctcgctcactgactcgctgcgctcggtcgttcggctgcggcgagcggtatcagctcactcaaagg
cggtaatacggttatccacagaatcaggggataacgcaggaaagaacatgtgagcaaaaggccagcaaaa
ggccaggaaccgtaaaaaggccgcgttgctggcgtttttccataggctccgcccccctgacgagcatcac
aaaaatcgacgctcaagtcagaggtggcgaaacccgacaggactataaagataccaggcgtttccccctg
gaagctccctcgtgcgctctcctgttccgaccctgcegettaccggatacctgtccgcctttctcccttc
gggaagcgtggcgctttctcatagctcacgctgtaggtatctcagtteggtgtaggtegttegetccaag
ctgggctgtgtgcacgaaccccccgttcagcccgaccgctgcgccttatccggtaactatcgtcttgagt
ccaacccggtaagacacgacttatcgccactggcagcagccactggtaacaggattagcagagcgaggta
tgtaggcggtgctacagagttcttgaagtggtggcctaactacggctacactagaaggacagtatttggt
atctgcgctctgctgaagccagttaccttcggaaaaagagttggtagctcttgatccggcaaacaaacca
ccgctggtagcggtggtttttttgtttgcaagcagcagattacgcgcagaaaaaaaggatctcaagaaga
teetttgatcttttctacggggtctgacgctcagtggaacgaaaactcacgttaagggattttggtcatg
agattatcaaaaaggatcttcacctagatccttttaaattaaaaatgaagttttaaatcaatctaaagta
tatatgagtaaacttggtctgacagttaccaatgcttaatcagtgaggcacctatctcagcgatctgtct
atttegttcatecatagttgcctgactccccgtcgtgtagataactacgatacgggagggcttaccatct
ggccccagtgetgcaatgataccgcgagacccacgctcaccggctccagatttatcagcaataaaccage
cagccggaagggccgagcgcagaagtggtcctgcaactttatccgcctccatccagtctattaattgttg
eegggaagetagagtaagtagttegecagttaatagtttgcgcaacgttgttgccattgetgcaggcatc
gtggtgtcacgctcgtcgtttggtatggcttcattcagctccggttcccaacgatcaaggcgagttacat
gatcccecatgttgtgcaaaaaagcggttagctccttcggtcctccgategttgtcagaagtaagttggc
cgcagtgttatcactcatggttatggcagcactgcataattctcttactgtcatgccatccgtaagatgc
ttttctgtgactggtgagtactcaaccaagtcattctgagaatagtgtatgcggcgaccgagttgctctt
gcccggcgtcaacacgggataataccgcgccacatagcagaactttaaaagtgctcatcattggaaaacg
ttcttcggggcgaaaactctcaaggatcttacegetgttgagatccagttcgatgtaacccactcgtgca
cccaactgatcttcagcatcttttactttcaccagcgtttctgggtgagcaaaaacaggaaggcaaaatg
ccgcaaaaaagggaataagggcgacacggaaatgttgaatactcatactcttcctttttcaatattattg
aagcatttatcagggttattgtctcatgagcggatacatatttgaatgtatttagaaaaataaacaaata
ggggttccgcgcacatttccccgaaaagtgccacctgtctagctacgatatcctgtttaaacatcatcaa
taatataccttatagatggaatggtgccaatatgtaaatgaggtgattttaaaaagtgtgggccgtgtgg
tgattggctgtggggttaacggttaaaaggggcggcgcggccgtgggaaaatgacgttttatgggggtgg
agtttatttaaatataacttcgtatagcatacattatacgaagttatggatccttttgcaagttgtcgcg
ggaaatgttacgcataaaaaggcttcttttctcacggaactacttagttttcccacggtatttaacagga
aatgaggtagttttgaccggatgcaagtgaaaattgctgattttcgcgcgaaaactgaatgaggaagtgt
ttttctgaataatgtggtatttatggcagggtggagtatttgttcagggccaggtagactttgacccatt
acgtggaggtttcgattaccgtgttttttacctgaatttccgcgtaccgtgtcaaagtcttctgttttta
cgtaggtgtcagctgatcgctagggtatttataacttcgtatagcatacattatacgaagttatatttaa
ataggaatgtttatgccttaccagtgtaacatgaatcatgtgaaagtgttgttggaaccagatgcctttt
ccagaatgagcctaacaggaatctttgacatgaacacgcaaatctggaagatcctgaggtatgatgatac
gagatcgagggtgcgcgcatgcgaatgcggaggcaagcatgccaggttccagccggtgtgtgtagatgtg
accgaagatctcagaccggatcatttggttattgcccgcactggagcagagttcggatccagtggagaag
aaactgactaaggtgagtattgggaaaactttggggtgggattttcagatggacagattgagtaaaaatt
tgttttttctgtcttgcagctgacatgagtggaaatgcttcttttaaggggggagtcttcagcccttatc
tgacagggcgtctcccatcctgggcaggagttcgtcagaatgttatgggatctactgtggatggaagacc
cgttcaacccgccaattcttcaacgctgacctatgctactttaagttcttcacctttggacgcagctgca
gccgctgccgccgcctctgtcgccgctaacactgtgcttggaatgggttactatggaagcatcgtggcta
attccacttcctctaataacccttctacactgactcaggacaagttacttgtccttttggcccagctgga
ggctttgacccaacgtctgggtgaactttctcagcaggtggccgagttgcgagtacaaactgagtctgct
gtcggcacggcaaagtctaaataaaaaaaattccagaatcaatgaataaataaacgagcttgttgttgat
ttaaaatcaagtgtttttatttcatttttcgcgcacggtatgccctggaccaccgatctcgatcattgag
aactcggtggattttttccagaatcctatagaggtgggattgaatgtttagatacatgggcattaggccg
tctttggggtggagatagctccattgaagggattcatgctccggggtagtgttgtaaatcacccagtcat
aacaaggtcgcagtgcatggtgttgcacaatatcttttagaagtaggctgattgccacagataagccctt
ggtgtaggtgtttacaaaccggttgagctgggaggggtgcattcgaggtgaaattatgtgcattttggat
tggatttttaagttggcaatattgccgccaagatcccgtcttgggttcatgttatgaaggactaccaaga
cggtgtatccggtacatttaggaaatttatcgtgcagcttggatggaaaagcgtggaaaaatttggagac
acccttgtgtcctccgagattttccatgcactcatccatgataatagcaatggggccgtgggcagcggcg
cgggcaaacacgttccgtgggtctgacacatcatagttatgttcctgagttaaatcatcataagccattt
taatgaatttggggcggagcgtaccagattggggtatgaatgttccttcgggccccggagcatagttccc
ctcacagatttgcatttcccaagctttcagttctgagggtggaatcatgtccacctggggggctatgaag
aacaccgtttcgggggcgggggtgattagttgggatgatagcaagtttctgagcaattgagatttgccac
atccggtggggccataaataattccgattacaggttgcaggtggtagtttagggaacggcaactgccgtc
ttctcgaagcaagggggccacctcgttcatcatttcccttacatgcatattttcccgcaccaaatccatt
aggaggcgctctcctcctagtgatagaagttcttgtagtgaggaaaagtttttcagcggttttagaccgt
cagecatgggcattttggaaagagtttgetgcaaaagttctagtctgttccacagttcagtgatgtgttc
tatggcatctcgatccagcagacctcctcgtttcgcgggtttggacggctcctggagtagggtatgagac
gatgggcgtccagcgctgccagggttcggtccttccagggtctcagtgttcgagtcagggttgtttccgt
cacagtgaaggggtgtgcgcctgcttgggcgcttgccagggtgcgcttcagactcattctgctggtggag
aacttctgtcgcttggcgccctgtatgtcggccaagtagcagtttaccatgagttcgtagttgagcgcct
cggctgcgtggcctttggcgcggagcttacctttggaagttttcttgcataccgggcagtataggcattt
cagcgcatacagcttgggcgcaaggaaaatggattctggggagtatgcatccgcgccgcaggaggcgcaa
acagtttcacattccaccagccaggttaaatccggttcattggggtcaaaaacaagttttccgccatatt
ttttgatgcgtttcttacctttggtctccataagttcgtgtcctcgttgagtgacaaacaggctgtccgt
atctccgtagactgattttacaggcctcttctccagtggagtgcctcggtcttcttcgtacaggaactct
gaccactctgatacaaaggcgcgcgtccaggccagcacaaaggaggctatgtgggaggggtagcgatcgt
tgtcaaccagggggtccaccttttccaaagtatgcaaacacatgtcaccctcttcaacatccaggaatgt
gattggcttgtaggtgtatttcacgtgacctggggtccccgctgggggggtataaaagggggcggttctt
tgctcttcctcactgtcttccggatcgctgtccaggaacgtcagctgttggggtaggtattccctctcga
aggcgggcatgacctctgcactcaggttgtcagtttctaagaacgaggaggatttgatattgacagtgcc
ggttgagatgcctttcatgaggttttcgtccatttggtcagaaaacacaatttttttattgtcaagtttg
gtggcaaatgatccatacagggcgttggataaaagtttggcaatggatcgcatggtttggttcttttcct
tgtccgcgcgctctttggcggcgatgttgagttggacatactcgcgtgccaggcacttccattcggggaa
gatagttgttaattcatctggcacgattctcacttgccaccctcgattatgcaaggtaattaaatccaca
ctggtggccacctcgcctcgaaggggttcattggtccaacagagcctacctcctttcctagaacagaaag
ggggaagtgggtctagcataagttcatcgggagggtctgcatccatggtaaagattcccggaagtaaatc
cttatcaaaatagctgatgggagtggggtcatctaaggccatttgccattctcgagctgccagtgcgcgc
tcatatgggttaaggggactgccccagggcatgggatgggtgagagcagaggcatacatgccacagatgt
catagacgtagatgggatcctcaaagatgcctatgtaggttggatagcatcgcccccctctgatacttgc
tcgcacatagtcatatagttcatgtgatggcgctagcagccccggacccaagttggtgcgattgggtttt
tctgttctgtagacgatctggcgaaagatggcgtgagaattggaagagatggtgggtctttgaaaaatgt
tgaaatgggcatgaggtagacctacagagtctctgacaaagtgggcataagattcttgaagcttggttac
cagttcggcggtgacaagtacgtctagggcgcagtagtcaagtgtttcttgaatgatgtcataacctggt
tggtttttcttttcccacagttcgcggttgagaaggtattcttcgcgatccttccagtactcttctagcg
gaaacccgtctttgtctgcacggtaagatcctagcatgtagaactgattaactgccttgtaagggcagca
gcccttctctacgggtagagagtatgcttgagcagcttttcgtagcgaagcgtgagtaagggcaaaggtg
tctctgaccatgactttgagaaattggtatttgaagtccatgtcgtcacaggctccctgttcccagagtt
ggaagtctacccgtttcttgtaggcggggttgggcaaagcgaaagtaacatcattgaagagaatcttacc
ggctctgggcataaaattgcgagtgatgcggaaaggctgtggtacttccgctcgattgttgatcacctgg
gcagctaggacgatttcgtcgaaaccgttgatgttgtgtcctacgatgtataattctatgaaacgcggcg
tgcctctgacgtgaggtagcttactgagctcatcaaaggttaggtctgtggggtcagataaggcgtagtg
ttcgagagcccattcgtgcaggtgaggatttgcatgtaggaatgatgaccaaagatctaccgccagtgct
gtttgtaactggtcccgatactgacgaaaatgccggccaattgccattttttctggagtgacacagtaga
aggttctggggtcttgttgccatcgatcccacttgagtttaatggctagatcgtgggccatgttgacgag
acgctcttctcctgagagtttcatgaccagcatgaaaggaactagttgtttgccaaaggatcccatccag
gtgtaagtttccacatcgtaggtcaggaagagtctttctgtgcgaggatgagagccgatcgggaagaact
ggatttcctgccaccagttggaggattggctgttgatgtgatggaagtagaagtttctgcggcgcgccga
gcattcgtgtttgtgcttgtacagacggccgcagtagtcgcagcgttgcacgggttgtatctcgtgaatg
agctgtacctggcttcccttgacgagaaatttcagtgggaagccgaggcctggcgattgtatctcgtgct
cttctatattcgctgtatcggcctgttcatcttctgtttcgatggtggtcatgctgacgagcccccgcgg
gaggcaagtccagacctcggcgcgggaggggcggagctgaaggacgagagcgcgcaggctggagctgtcc
agagtcctgagacgctgcggactcaggttagtaggtagggacagaagattaacttgcatgatcttttcca
gggcgtgcgggaggttcagatggtacttgatttccacaggttcgtttgtagagacgtcaatggcttgcag
ggttccgtgtcctttgggcgccactaccgtacctttgttttttcttttgatcggtggtggctctcttgct
tcttgcatgctcagaagcggtgacggggacgcgcgccgggcggcagcggttgttccggacccgggggcat
ggctggtagtggcacgtcggcgccgcgcacgggcaggttctggtattgcgctctgagaagacttgcgtgc
gccaccacgcgtcgattgacgtcttgtatctgacgtctctgggtgaaagctaccggccccgtgagcttga
acctgaaagagagttcaacagaatcaatttcggtatcgttaacggcagcttgtctcagtatttcttgtac
gtcaccagagttgtcctggtaggcgatctccgccatgaactgctcgatttcttcctcctgaagatctccg
cgacccgctctttcgacggtggccgcgaggtcattggagatacggcccatgagttgggagaatgcattca
tgcccgcctcgttccagacgcggctgtaaaccacggccccctcggagtctcttgcgcgcatcaccacctg
agcgaggttaagctccacgtgtctggttaagaccgcatagttgcataggcgctgaaaaaggtagttgagt
gtggtggcaatgtgttcggcgacgaagaaatacatgatccatcgtctcagcggcatttcgctaacatcgc
ccagagcttccaagcgctccatggcctcgtagaagtccacggcaaaattaaaaaactgggagtttcgcgc
ggacacggtcaattcctcctcgagaagacggatgagttcggctatggtggcccgtacttcgcgttcgaag
gctcccgggatctcttcttcctcttctatctcttcttccactaacatctcttcttcgtcttcaggcgggg
gcggagggggcacgcggcgacgtcgacggcgcacgggcaaacggtcgatgaatcgttcaatgacctctcc
gcggcggcggcgcatggtttcagtgacggcgcggccgttctcgcgcggtcgcagagtaaaaacaccgccg
cgcatctccttaaagtggtgactgggaggttctccgtttgggagggagagggcgctgattatacatttta
ttaattggcccgtagggactgcgcgcagagatctgatcgtgtcaagatccacgggatctgaaaacctttc
gacgaaagcgtctaaccagtcacagtcacaaggtaggctgagtacggcttcttgtgggcgggggtggtta
tgtgttcggtctgggtcttctgtttcttcttcatctcgggaaggtgagacgatgctgctggtgatgaaat
taaagtaggcagttctaagacggcggatggtggcgaggagcaccaggtctttgggtccggcttgctggat
acgcaggcgattggccattccccaagcattatcctgacatctagcaagatctttgtagtagtcttgcatg
agccgttctacgggcacttcttcctcacccgttctgccatgcatacgtgtgagtccaaatccgcgcattg
gttgtaccagtgccaagtcagctacgactctttcggcgaggatggcttgctgtacttgggtaagggtggc
ttgaaagtcatcaaaatccacaaagcggtggtaagcccctgtattaatggtgtaagcacagttggccatg
actgaccagttaactgtctggtgaccagggcgcacgagctcggtgtatttaaggcgcgaataggcgcggg
tgtcaaagatgtaatcgttgcaggtgcgcaccagatactggtaccctataagaaaatgcggcggtggttg
gcggtagagaggccatcgttctgtagctggagcgccaggggcgaggtcttccaacataaggcggtgatag
ccgtagatgtacctggacatccaggtgattcctgcggcggtagtagaagcccgaggaaactcgcgtacgc
ggttccaaatgttgcgtagcggcatgaagtagttcattgtaggcacggtttgaccagtgaggcgcgcgca
gtcattgatgctctatagacacggagaaaatgaaagcgttcagcgactcgactccgtagcctggaggaac
gtgaacgggttgggtcgcggtgtaccccggttcgagacttgtactcgagccggccggagccgcggctaac
gtggtattggcactcccgtctcgacccagcctacaaaaatccaggatacggaatcgagtcgttttgctgg
tttccgaatggcagggaagtgagtcctatttttttttttttttgccgctcagaatgcatcccgtgctgcg
acagatgcgcccccaacaacagcccccctcgcagcagcagcagcagcaaccacaaaaggctgtccctgca
actactgcaactgccgccgtgagcggtgcgggacagcccgcctatgatctggacttggaagagggcgaag
gactggcacgtctaggtgcgccttcgcccgagcggcatccgcgagttcaactgaaaaaagattctcgcga
ggcgtatgtgccccaacagaacctatttagagacagaagcggcgaggagccggaggagatgcgagcttcc
cgctttaacgcgggtcgtgagctgcgtcacggtttggaccgaagacgagtgttgcgagacgaggatttcg
aagttgatgaagtgacagggatcagtcctgccagggcacacgtggctgcagccaaccttgtatcggctta
cgagcagacagtaaaggaagagcgtaacttccaaaagtcttttaataatcatgtgcgaaccctgattgcc
cgcgaagaagttacccttggtttgatgcatttgtgggatttgatggaagctatcattcagaaccctacta
gcaaacctctgaccgcccagctgtttctggtggtgcaacacagcagagacaatgaggctttcagagaggc
gctgctgaacatcaccgaacccgaggggagatggttgtatgatcttatcaacattctacagagtatcata
gtgcaggagcggagcctgggcctggccgagaaggtagctgccatcaattactcggttttgagcttgggaa
aatattacgctcgcaaaatctacaagactccatacgttcccatagacaaggaggtgaagatagatgggtt
ctacatgcgcatgacgctcaaggtcttgaccctgagcgatgatcttggggtgtatcgcaatgacagaatg
catcgcgcggttagcgccagcaggaggcgcgagttaagcgacagggaactgatgcacagtttgcaaagag
ctctgactggagctggaaccgagggtgagaattacttcgacatgggagctgacttgcagtggcagcctaa
tcgcagggctctgagcgccgcgacggcaggatgtgagcttccttacatagaagaggcggatgaaggcgag
gaggaagagggcgagtacttggaagactgatggcacaacccgtgttttttgctagatggaacagcaagca
ccggatcccgcaatgcgggcggcgctgcagagccagccgtccggcattaactcctcggacgattggaccc
aggccatgcaacgtatcatggcgttgacgactcgcaaccccgaagcctttagacagcaaccccaggccaa
ccgtctatcggccatcatggaagctgtagtgccttcccgatctaatcccactcatgagaaggtcctggcc
atcgtgaacgcgttggtggagaacaaagctattcgtccagatgaggccggactggtatacaacgctctct
tagaacgcgtggctcgctacaacagtagcaatgtgcaaaccaatttggaccgtatgataacagatgtacg
cgaagccgtgtctcagcgcgaaaggttccagcgtgatgccaacctgggttcgctggtggcgttaaatgct
ttcttgagtactcagectgetaatgtgccgcgtggtcaacaggattatactaactttttaagtgetttga
gactgatggtatcagaagtacctcagagcgaagtgtatcagtccggtcctgattacttctttcagactag
cagacagggcttgcagacggtaaatctgagccaagcttttaaaaaccttaaaggtttgtggggagtgcat
gccccggtaggagaaagagcaaccgtgtctagcttgttaactccgaactcccgcctgttattactgttgg
tagctcctttcaccgacagcggtagcatcgaccgtaattcctatttgggttacctactaaacctgtatcg
cgaagccatagggcaaagtcaggtggacgagcagacctatcaagaaattacccaagtcagtcgcgctttg
ggacaggaagacactggcagtttggaagccactctgaacttcttgcttaccaatcggtctcaaaagatcc
ctcctcaatatgctcttactgcggaggaggagaggatccttagatatgtgcagcagagcgtgggattgtt
tctgatgcaagagggggcaactccgactgcagcactggacatgacagcgcgaaatatggagcccagcatg
tatgccagtaaccgacctttcattaacaaactgctggactacttgcacagagctgccgctatgaactctg
attatttcaccaatgccatcttaaacccgcactggctgcccccacctggtttctacacgggcgaatatga
catgcccgaccctaatgacggatttctgtgggacgacgtggacagcgatgttttttcacctctttctgat
catcgcacgtggaaaaaggaaggcggtgatagaatgcattcttctgcatcgctgtccggggtcatgggtg
ctaccgcggctgagcccgagtctgcaagtccttttcctagtctacccttttctctacacagtgtacgtag
cagcgaagtgggtagaataagtcgcccgagtttaatgggcgaagaggagtacctaaacgattccttgete
agaccggcaagagaaaaaaatttcccaaacaatggaatagaaagtttggtggataaaatgagtagatgga
agacttatgctcaggatcacagagacgagcctgggatcatggggactacaagtagagcgagccgtagacg
ccagcgccatgacagacagaggggtcttgtgtgggacgatgaggattcggccgatgatagcagcgtgttg
gacttgggtgggagaggaaggggcaacccgtttgctcatttgcgccctcgcttgggtggtatgttgtgaa
aaaaaataaaaaagaaaaactcaccaaggccatggcgacgagcgtacgttcgttcttctttattatctgt
gtctagtataatgaggcgagtcgtgctaggcggagcggtggtgtatccggagggtcctcctccttcgtac
gagagcgtgatgcagcagcagcaggcgacggcggtgatgcaatccccactggaggctccctttgtgcctc
cgcgatacctggcacctacggagggcagaaacagcattcgttactcggaactggcacctcagtacgatac
caccaggttgtatctggtggacaacaagtcggcggacattgcttctctgaactatcagaatgaccacagc
aacttcttgaccacggtggtgcagaacaatgactttacccctacggaagccagcacccagaccattaact
ttgatgaacgatcgcggtggggcggtcagctaaagaccatcatgcatactaacatgccaaacgtgaacga
gtatatgtttagtaacaagttcaaagcgcgtgtgatggtgtccagaaaacctcccgacggtgctgcagtt
ggggatacttatgatcacaagcaggatattttggaatatgagtggttcgagtttactttgccagaaggca
acttttcagttactatgactattgatttgatgaacaatgccatcatagataattacttgaaagtgggtag
acagaatggagtgcttgaaagtgacattggtgttaagttcgacaccaggaacttcaagctgggatgggat
cccgaaaccaagttgatcatgcctggagtgtatacgtatgaagccttccatcctgacattgtcttactgc
ctggctgcggagtggattttaccgagagtcgtttgagcaaccttcttggtatcagaaaaaaacagccatt
tcaagagggttttaagattttgtatgaagatttagaaggtggtaatattccggccctcttggatgtagat
gcctatgagaacagtaagaaagaacaaaaagccaaaatagaagctgctacagctgctgcagaagctaagg
caaacatagttgccagcgactctacaagggttgctaacgctggagaggtcagaggagacaattttgcgcc
aacacctgttccgactgcagaatcattattggccgatgtgtctgaaggaacggacgtgaaactcactatt
caacctgtagaaaaagatagtaagaatagaagctataatgtgttggaagacaaaatcaacacagcctatc
gcagttggtatctttcgtacaattatggcgatcccgaaaaaggagtgcgttcctggacattgctcaccac
ctcagatgtcacctgcggagcagagcaggtttactggtcgcttccagacatgatgaaggatcctgtcact
ttccgctccactagacaagtcagtaactaccctgtggtgggtgcagagcttatgcccgtcttctcaaaga
gcttctacaacgaacaagctgtgtactcccagcagctccgccagtccacctcgcttacgcacgtcttcaa
ccgctttcctgagaaccagattttaatccgtccgccggcgcccaccattaccaccgtcagtgaaaacgtt
cctgctctcacagatcacgggaccctgccgttgcgcagcagtatccggggagtccaacgtgtgaccgtta
ctgacgccagacgccgcacctgtccctacgtgtacaaggcactgggcatagtcgcaccgcgcgtcctttc
aagccgcactttctaaaaaaaaaatgtccattcttatctcgcccagtaataacaccggttggggtctgcg
cgctccaagcaagatgtacggaggcgcacgcaaacgttctacccaacatcccgtgcgtgttcgcggacat
tttcgcgctccatggggtgccctcaagggccgcactcgcgttcgaaccaccgtcgatgatgtaategate
aggtggttgccgacgcccgtaattatactcctactgcgcctacatctactgtggatgcagttattgacag
tgtagtggctgacgctcgcaactatgctcgacgtaagagccggcgaaggcgcattgccagacgccaccga
gctaccactgccatgcgagccgcaagagctctgctacgaagagctagacgcgtggggcgaagagccatgc
ttagggcggccagacgtgcagcttcgggcgccagcgccggcaggtcccgcaggcaagcagccgctgtcgc
agcggcgactattgccgacatggcccaatcgcgaagaggcaatgtatactgggtgcgtgacgctgccacc
ggtcaacgtgtacccgtgcgcacccgtccccctcgcacttagaagatactgagcagtctccgatgttgtg
tcccagcggcgaggatgtccaagcgcaaatacaaggaagaaatgctgcaggttatcgcacctgaagtcta
cggccaaccgttgaaggatgaaaaaaaaccccgcaaaatcaagcgggttaaaaaggacaaaaaagaagag
gaagatggcgatgatgggctggcggagtttgtgcgcgagtttgccccacggcgacgcgtgcaatggcgtg
ggcgcaaagttcgacatgtgttgagacctggaacttcggtggtctttacacccggcgagcgttcaagcgc
tacttttaagcgttcctatgatgaggtgtacggggatgatgatattcttgagcaggcggctgaccgatta
ggcgagtttgcttatggcaagcgtagtagaataacttccaaggatgagacagtgtcaatacccttggatc
atggaaatcccacccctagtcttaaaccggtcactttgcagcaagtgttacccgtaactccgcgaacagg
tgttaaacgcgaaggtgaagatttgtatcccactatgcaactgatggtacccaaacgccagaagttggag
gacgttttggagaaagtaaaagtggatccagatattcaacctgaggttaaagtgagacccattaagcagg
tagcgcctggtctgggggtacaaactgtagacattaagattcccactgaaagtatggaagtgcaaactga
acccgcaaagcctactgccacctccactgaagtgcaaacggatccatggatgcccatgcctattacaact
gacgccgccggtcccactcgaagatcccgacgaaagtacggtccagcaagtctgttgatgcccaattatg
ttgtacacccatctattattcctactcctggttaccgaggcactcgctactatcgcagccgaaacagtac
ctcccgccgtcgccgcaagacacctgcaaatcgcagtcgtcgccgtagacgcacaagcaaaccgactccc
ggcgccctggtgcggcaagtgtaccgcaatggtagtgcggaacctttgacactgccgcgtgcgcgttacc
atccgagtatcatcacttaatcaatgttgccgctgcctccttgcagatatggccctcacttgtcgccttc
gcgttcccatcactggttaccgaggaagaaactcgcgccgtagaagagggatgttgggacgcggaatgcg
acgctacaggcgacggcgtgctatccgcaagcaattgcggggtggttttttaccagccttaattccaatt
atcgctgctgcaattggcgcgataccaggcatagcttccgtggcggttcaggcctcgcaacgacattgac
attggaaaaaaaacgtataaataaaaaaaaatacaatggactctgacactcctggtcctgtgactatgtt
ttcttagagatggaagacatcaatttttcatccttggctccgcgacacggcacgaagccgtacatgggca
cctggagcgacatcggcacgagccaactgaacgggggcgccttcaattggagcagtatctggagcgggct
taaaaattttggctcaaccataaaaacatacgggaacaaagcttggaacagcagtacaggacaggcgctt
agaaataaacttaaagaccagaacttccaacaaaaagtagtcgatgggatagcttccggcatcaatggag
tggtagatttggctaaccaggctgtgcagaaaaagataaacagtcgtttggacccgccgccagcaacccc
aggtgaaatgcaagtggaggaagaaattcctccgccagaaaaacgaggcgacaagcgtccgcgtcccgat
ttggaagagacgctggtgacgcgcgtagatgaaccgccttcttatgaggaagcaacgaagcttggaatgc
ccaccactagaccgatagccccaatggccaccggggtgatgaaaccttctcagttgcatcgacccgtcac
cttggatttgccccctccccctgctgctactgctgtacccgcttctaagcctgtcgctgccccgaaacca
gtcgccgtagccaggtcacgtcccgggggcgctcctcgtccaaatgcgcactggcaaaatactctgaaca
gcatcgtgggtctaggcgtgcaaagtgtaaaacgccgtcgctgcttttaattaaatatggagtagcgctt
aacttgcctatctgtgtatatgtgtcattacacgccgtcacagcagcagaggaaaaaaggaagaggtcgt
gcgtcgacgctgagttactttcaagatggccaccccatcgatgctgccccaatgggcatacatgcacatc
gccggacaggatgcttcggagtacctgagtccgggtctggtgcagttcgcccgcgccacagacacctact
tcaatctgggaaataagtttagaaatcccaccgtagcgccgacccacgatgtgaccaccgaccgtagcca
gcggctcatgttgcgcttcgtgcccgttgaccgggaggacaatacatactcttacaaagtgcggtacacc
ctggccgtgggcgacaacagagtgctggatatggccagcacgttctttgacattaggggcgtgttggaca
gaggtcccagtttcaaaccctattctggtacggcttacaactctctggctcctaaaggcgctccaaatgc
atctcaatggattgcaaaaggcgtaccaactgcagcagccgcaggcaatggtgaagaagaacatgaaaca
gaggagaaaactgctacttacacttttgccaatgctcctgtaaaagccgaggctcaaattacaaaagagg
gcttaccaataggtttggagatttcagctgaaaacgaatctaaacccatctatgcagataaactttatca
gccagaacctcaagtgggagatgaaacttggactgacctagacggaaaaaccgaagagtatggaggcagg
gctctaaagcctactactaacatgaaaccctgttacgggtcctatgcgaagcctactaatttaaaaggtg
gtcaggcaaaaccgaaaaactcggaaccgtcgagtgaaaaaattgaatatgatattgacatggaattttt
tgataactcatcgcaaagaacaaacttcagtcctaaaattgtcatgtatgcagaaaatgtaggtttggaa
acgccagacactcatgtagtgtacaaacctggaacagaagacacaagttccgaagctaatttgggacaac
agtctatgcccaacagacccaactacattggcttcagagataactttattggactcatgtactataacag
tactggtaacatgggggtgctggctggtcaagcgtctcagttaaatgcagtggttgacttgcaggacaga
aacacagaactttcttaccaactcttgcttgactctctgggcgacagaaccagatactttagcatgtgga
atcaggctgtggacagttatgatcctgatgtacgtgttattgaaaatcatggtgtggaagatgaacttcc
caactattgttttccactggacggcataggtgttccaacaaccagttacaaatcaatagttccaaatgga
gaagataataataattggaaagaacctgaagtaaatggaacaagtgagatcggacagggtaatttgtttg
ccatggaaattaaccttcaagccaatctatggcgaagtttcctttattccaatgtggctctgtatctccc
agactcgtacaaatacaccccgtccaatgtcactcttccagaaaacaaaaacacctacgactacatgaac
gggcgggtggtgccgccatctctagtagacacctatgtgaacattggtgccaggtggtctctggatgcca
tggacaatgtcaacccattcaaccaccaccgtaacgctggcttgcgttaccgatctatgcttctgggtaa
cggacgttatgtgcctttccacatacaagtgcctcaaaaattcttcgctgttaaaaacctgctgcttctc
ccaggctcctacacttatgagtggaactttaggaaggatgtgaacatggttctacagagttccctcggta
acgacctgcgggtagatggcgccagcatcagtttcacgagcatcaacctctatgctacttttttccccat
ggctcacaacaccgcttccacccttgaagccatgctgcggaatgacaccaatgatcagtcattcaacgac
tacctatctgcagctaacatgctctaccccattcctgccaatgcaaccaatattcccatttccattcctt
ctcgcaactgggcggctttcagaggctggtcatttaccagactgaaaaccaaagaaactccctctttggg
gtctggatttgacccctactttgtctattctggttctattccctacctggatggtaccttctacctgaac
cacacttttaagaaggtttccatcatgtttgactcttcagtgagctggcctggaaatgacaggttactat
ctcctaacgaatttgaaataaagcgcactgtggatggcgaaggctacaacgtagcccaatgcaacatgac
caaagactggttcttggtacagatgctcgccaactacaacatcggctatcagggcttctacattccagaa
ggatacaaagatcgcatgtattcatttttcagaaacttccagcccatgagcaggcaggtggttgatgagg
tcaattacaaagacttcaaggccgtcgccataccctaccaacacaacaactctggctttgtgggttacat
ggctccgaccatgcgccaaggtcaaccctatcccgctaactatccctatccactcattggaacaactgcc
gtaaatagtgttacgcagaaaaagttcttgtgtgacagaaccatgtggcgcataccgttctcgagcaact
tcatgtctatgggggcccttacagacttgggacagaatatgctctatgccaactcagctcatgctctgga
catgacctttgaggtggatcccatggatgagcccaccctgctttatcttctcttcgaagttttcgacgtg
gtcagagtgcatcagccacaccgcggcatcatcgaggcagtctacctgcgtacaccgttctcggccggta
acgctaccacgtaagaagcttcttgcttcttgcaaatagcagctgcaaccatggcctgcggatcccaaaa
cggctccagcgagcaagagctcagagccattgtccaagacctgggttgcggaccctattttttgggaacc
tacgataagcgcttcccggggttcatggcccccgataagctcgcctgtgccattgtaaatacggccggac
gtgagacggggggagagcactggttggctttcggttggaacccacgttctaacacctgctacctttttga
tccttttggattctcggatgatcgtctcaaacagatttaccagtttgaatatgagggtctcctgcgccgc
agcgctcttgctaccaaggaccgctgtattacgctggaaaaatctacccagaccgtgcagggcccccgtt
ctgccgcctgcggacttttctgctgcatgttccttcacgcctttgtgcactggcctgaccgtcccatgga
cggaaaccccaccatgaaattgctaactggagtgccaaacaacatgcttcattctcctaaagtccagccc
accctgtgtgacaatcaaaaagcactctaccattttcttaatacccattcgccttattttcgctctcatc
gtacacacatcgaaagggccactgcgttcgaccgtatggatgttcaataatgactcatgtaaacaacgtg
ttcaataaacatcactttatttttttacatgtatcaaggctctggattacttatttatttacaagtcgaa
tgggttctgacgagaatcagaatgacccgcaggcagtgatacgttgcggaactgatacttgggttgccac
ttgaattcgggaatcaccaacttgggaaccggtatatcgggcaggatgtcactccacagctttctggtca
gctgcaaagctccaagcaggtcaggagccgaaatcttgaaatcacaattaggaccagtgctctgagcgcg
agagttgcggtacaccggattgcagcactgaaacaccatcagcgacggatgtctcacgcttgccagcacg
gtgggatctgcaatcatgcccacatccagatcttcagcattggcaatgctgaacggggtcatcttgcagg
tctgcctacccatggcgggcacccaattaggcttgtggttgcaatcgcagtgcagggggatcagtatcat
cttggcctgatcctgtctgattcctggatacacggctctcatgaaagcatcatattgcttgaaagcctgc
tgggctttactaccctcgggataaaacatcccgcaggacctgctcgaaaactggttagcctgcacagccg
gcatcattcacacagcagcgggcgtcattgttggctatttgcaccacacttctgccccagcggttttggg
tgattttggttcgctcgggattctcctttaaggctcgttgtccgttctcgctggccacatccatctcgat
aatctgctccttctgaatcataatattgccatgcaggcacttcagcttgccctcataatcattgcagcca
tgaggccacaacgcacagcctgtacattcccaattatggtgggcgatctgagaaaaagaatgtatcattc
cctgcagaaatcttcccatcatcgtgctcagtgtcttgtgactagtgaaagttaactggatgcctcggtg
ctcttcgtttacgtactggtgacagatgcgcttgtattgttcgtgttgctcaggcattagtttaaaacag
gttctaagttcgttatccagcctgtacttctccatcagcagacacatcacttccatgcctttctcccaag
cagacaccaggggcaagctaatcggattcttaacagtgcaggcagcagctcctttagccagagggtcatc
tttagcgatcttctcaatgcttcttttgccatccttctcaacgatgcgcacgggcgggtagctgaaaccc
actgctacaagttgcgcctcttctctttcttcttcgctgtcttgactgatgtcttgcatggggatatgtt
tggtcttccttggcttctttttggggggtatcggaggaggaggactgtcgctccgttccggagacaggga
ggattgtgacgtttcgctcaccattaccaactgactgtcggtagaagaacctgaccccacacggcgacag
gtgtttttcttcgggggcagaggtggaggcgattgcgaagggctgcggtccgacctggaaggcggatgac
tggcagaaccccttccgcgttcgggggtgtgctccctgtggcggtcgcttaactgatttccttcgcggct
ggccattgtgttctcctaggcagagaaacaacagacatggaaactcagccattgctgtcaacatcgccac
gagtgccatcacatctcgtcctcagcgacgaggaaaaggagcagagcttaagcattccaccgcccagtcc
tgccaccacctctaccctagaagataaggaggtcgacgcatctcatgacatgcagaataaaaaagcgaaa
gagtctgagacagacatcgagcaagacccgggctatgtgacaccggtggaacacgaggaagagttgaaac
gctttctagagagagaggatgaaaactgcccaaaacagcgagcagataactatcaccaagatgctggaaa
tagggatcagaacaccgactacctcatagggcttgacggggaagacgcgctccttaaacatctagcaaga
cagtcgctcatagtcaaggatgcattattggacagaactgaagtgcccatcagtgtggaagagctcagct
gcgcctacgagcttaaccttttttcacctcgtactccccccaaacgtcagecaaacggcacctgcgagcc
aaatcctcgcttaaacttttatccagcttttgctgtgccagaagtactggctacctatcacatctttttt
aaaaatcaaaaaattccagtctcctgccgcgctaatcgcacccgcgccgatgccctactcaatctgggac
ctggttcacgcttacctgatatagcttccttggaagaggttccaaagatcttcgagggtctgggcaataa
tgagactcgggccgcaaatgetctgcaaaagggagaaaatggcatggatgagcatcacagcgttctggtg
gaattggaaggcgataatgccagactcgcagtactcaagcgaagcgtcgaggtcacacacttcgcatatc
cegetgtcaacctgeeccctaaagtcatgaeggeggtcatggaccagttactcattaagcgcgcaagtcc
cctttcagaagacatgcatgacccagatgcctgtgatgagggtaaaccagtggtcagtgatgagcagcta
acccgatggctgggcaccgactctccccgggatttggaagagcgtcgcaagcttatgatggccgtggtgc
tggttaccgtagaactagagtgtctccgacgtttctttaccgattcagaaaccttgcgcaaactcgaaga
gaatctgcactacacttttagacacggctttgtgcggcaggcatgcaagatatctaacgtggaactcacc
aacctggtttcctacatgggtattctgcatgagaatcgcctaggacaaagcgtgctgcacagcaccctta
agggggaagcccgccgtgattacatccgcgattgtgtctatctctacctgtgccacacgtggcaaaccgg
catgggtgtatggcagcaatgtttagaagaacagaacttgaaagagcttgacaagctcttacagaaatct
cttaaggttctgtggacagggttcgacgagcgcaccgtegettccgacctggcagacctcatcttcccag
agcgtctcagggttactttgcgaaacggattgcctgactttatgagccagagcatgcttaacaattttcg
ctctttcatcctggaacgctccggtatcctgcccgccacctgctgcgcactgccctccgactttgtgcct
ctcacctaccgcgagtgccccccgccgctatggagtcactgctacctgttccgtctggccaactatctct
cctaccactcggatgtgatcgaggatgtgagcggagacggcttgctggagtgccactgccgctgcaatct
gtgcacgccccaccggtccctagcttgcaacccccagttgatgagcgaaacccagataataggcaccttt
gaattgcaaggccccagcagccaaggcgatgggtcttctcctgggcaaagtttaaaactgaccccgggac
tgtggacctccgcctacttgcgcaagtttgctccggaagattaccacccctatgaaatcaagttctatga
ggaccaatcacagcctccaaaggccgaactttcggcttgcgtcatcacccagggggcaattctggcccaa
ttgcaagccatccaaaaatcccgccaagaatttctactgaaaaagggtaagggggtctaccttgaccccc
agaccggcgaggaactcaacacaaggttccctcaggatgtcccaacgacgagaaaacaagaagttgaagg
tgcagccgccgcccccagaagatatggaggaagattgggacagtcaggcagaggaggcggaggaggacag
tctggaggacagtctggaggaagacagtttggaggaggaaaacgaggaggcagaggaggtggaagaagta
accgccgacaaacagttatcctcggctgcggagacaagcaacagcgctaccatctccgctccgagtcgag
gaacccggcggcgtcccagcagtagatgggacgagaccggacgcttcccgaacccaaccagcgcttccaa
gaccggtaagaaggatcggcagggatacaagtcctggcgggggcataagaatgccatcatctcctgcttg
catgagtgcgggggcaacatatccttcacgcggcgctacttgctattccaccatggggtgaactttccgc
gcaatgttttgcattactaccgtcacctccacagcccctactatagccagcaaatcccgacagtctcgac
agataaagacagcggcggcgacctccaacagaaaaccagcagcggcagttagaaaatacacaacaagtgc
agcaacaggaggattaaagattacagccaacgagccagcgcaaacccgagagttaagaaatcggatcttt
ccaaccctgtatgccatcttccagcagagtcggggtcaagagcaggaactgaaaataaaaaaccgatctc
tgcgttcgctcaccagaagttgtttgtatcacaagagcgaagatcaacttcagcgcactctcgaggacgc
cgaggctctcttcaacaagtactgcgcgctgactcttaaagagtaggcagcgaccgcgcttattcaaaaa
aggcgggaattacatcatcctcgacatgagtaaagaaattcccacgccttacatgtggagttatcaaccc
caaatgggattggcagcaggcgcctcccaggactactccacccgcatgaattggctcagcgccgggcctt
ctatgatttctcgagttaatgatatacgcgcctaccgaaaccaaatacttttggaacagtcagctcttac
caccacgccccgccaacaccttaatcccagaaattggcccgccgccctagtgtaccaggaaagtcccgct
cccaccactgtattacttcctcgagacgcccaggccgaagtccaaatgactaatgcaggtgcgcagttag
ctggcggctccaccctatgtcgtcacaggcctcggcataatataaaacgcctgatgatcagaggccgagg
tatccagctcaacgacgagtcggtgagctctccgcttggtctacgaccagacggaatctttcagattgcc
ggctgcgggagatcttccttcacccctcgtcaggctgttctgactttggaaagttcgtcttcgcaacccc
gctcgggcggaatcgggaccgttcaatttgtagaggagtttactccctctgtctacttcaaccccttctc
cggatctcctgggcactacccggacgagttcataccgaacttcgacgcgattagcgagtcagtggacggc
tacgattgatgtctggtgacgcggctgagctatctcggctgcgacatctagaccactgccgccgctttcg
ctgctttgcccgggaacttattgagttcatctacttcgaactccccaaggatcaccctcaaggtccggcc
cacggagtgcggattactatcgaaggcaaaatagactctcgcctgcaacgaattttctcccagcggcccg
tgctgatcgagcgagaccagggaaacaccacggttagtaatcaattacggggtcattagttcatagccca
tatatggagttgcgatcgctgcgggccatgtcatacaccgccttcagagcagccggacctatctgcccgt
tcgtgccgtcgttgttaatcaccacatggttattctgctcaaacgtcccggacgcctgcgaccggctgtc
tgccatgctgcccggtgtaccgacataaccgccggtggcatagccgcgcatcagccggtaaagattcccc
acgccaatccggctggttgcctccttcgtgaagacaaactcaccacggtgaacaatccccgctggctcat
atttgccgccggttcccgtaaatcctccggttgcaaaatggaatttcgccgcagcggcctgaatggctgt
accgcctgacgcggatgcgccgccaccaacagccccgccaatggcgctgccgatactcccgacaatcccc
accattgcctgcttaagcagaatttctgtcatcatggacagcacggaacgggtgaagctgcgccagttct
gctcactgccggtcagcatcgccgccatattctgtgcaataccatcaaaggtctgcgtggctgcactttt
tacctgcgacatactgtccgtggcgctctcttcccactcactccagccggacttcaggcctgccatccag
ttcccgcgaagctggtcttcagccgcccaggtctttttctgctctgacatgacgttattcagcgccagcg
gattatcgccatactgttccttcaggcgctgttccgtggcttcccgttctgcctgccggtcagtcagccc
ccggcttttcgcatcaatggcggcccgttttgcccgttgctgctgtgcgaatttatccgcctgctgcgcc
agcgcgttcaggcgctcctgatacgtaaccttgtcgccaagtgcagccagctggcgtttgtactccagcg
tctcatctttatgcgccagcagggatttctcctgtgcagacagctggcgacgttgcgccgcctcctccag
taccgcgaactgactctccgccttccacaaatcccggcgctgctggctgattttctcatttgctccggca
tgcttctccagcgtccggagttctgcctgaagcgtcagcagggcagcatgagcactgtcttcctgacgat
cgcccgcagacaccttcacgctggactgtttcggctttttcagcgtcgcttcataatcctttttcgccgc
cgccatcagcgtgttgtaatccgcctgcaggattttcccgtctttcagtgccttgttcagttcttcctga
cgggcggtatatttctccagcggcgtctgcagccgttcgtaagccttctgcgcctcttcggtatatttca
gccgtgacgcttcggtatcgctctgctgctgcgcatttttgtcctgttgagtctgctgctcagccttctt
tcgggcggcttcaagcgcaagacgggccttttcacgatcatcccagtaacgcgcccgcgcttcatcgtta
acaaaataatcatccttgcgcagattccagatgtcgtctgctttcttatacgcagcctctgccttaatca
gcatctcctgcgcggtatcaggacgaccaatatccagcaccgcatcccacatggatttgaatgcccgcgc
agtcctgtctgcccaggtctccagcgtgcccatgttctctttcaggcggcgggtctggtcatcaaaccct
ttcgttgcggcctcgttcgccgcctgcaatgccccggcttcatcgccggaacgctgcaactgagcaacat
acgcaatctgctccgccgacacgttatggaactggcgagccatcgccgtcagccccgacgtcgggtctgt
ggtcagcttcccgaaggcttcagcgaccttgtccacctccacgccggatgcagaggagaaacgcgccaca
ctctggctgatggacgcaatctgagcctcaccgcttacccccgccttaaccagtgcgctgagtgactcgc
tggtctggttaaacgtcagccctgccgcctgcccggctctggacaggaccagcatacgatctgccgtcag
tcccgcctgattgccggaaaggaccagcgttttgttgaaatcggacagggttgagttgccctgataccag
gcatacgccagcgcaccggtcgccaccgccagcgaggtggcccccaccatcggcagggtgatcgcaccgg
caagccccctgaacatggggatcatcccgccgaaggagtccttcacctgccccccctgttgcagcaggat
cagccacggactttgcccgcctgcaagctgcgtggccacgtcggtgaactgtgcaggcagcatacgcatg
gcggctttatactgcccgacggaaatccccgctttctgtgcagccagcgcctgtcggctcagcgactgtt
caacgactgccgctgtttttttcgcatcactttccgtaccagaaaaatgacgcctgactctggccatctg
ctcgtcaaatctggccgcatccagactcaaatcaacgacgtcgactaagctctagcatttgtgaaccatc
accctaatcaagttttttggggtcgaggtgccgtaaagcactaaatcggaaccctaaagggagcccccga
tttagagcttgacggggaaagccggcgaacgtggcgagaaaggaagggaagaaagcgaaaggagcgggcg
ctagggcgctggcaagtgtagcggtcacgctgcgcgtaaccaccacacccgccgcgcttaatgcgccgct
acagggcgcgtggggataccccctagagccccagctggttctttccgcctcagaagccatagagcccacc
gcatccccagcatgcctgctattgtcttcccaatcctcccccttgctgtcctgccccaccccacccccca
gaatagaatgacacctactcagacaatgcgatgcaatttcctcattttattaggaaaggacagtgggagt
ggcaccttccagggtcaaggaaggcacgggggaggggcaaacaacagatggctggcaactagaaggcaca
gtcgaggctgatcagcgggtttgctagcttaggcgaaggcgatgggggtcttgaaggcgtgctggtactc
cacgatgcccagctcggtgttgctgtgcagctcctccacgcggcggaaggcgaacatggggcccccgttc
tgcaggatgctggggtggatggcgctcttgaagtgcatgtggctgtccaccacgaagctgtagtagccgc
cgtcgcgcaggctgaaggtgcgggcgaagctgcccaccagcacgttatcgcccatggggtgcaggtgctc
cacggtggcgttgctgcggatgatcttgtcggtgaagatcacgctgtcctcggggaagccggtgcccacc
accttgaagtcgccgatcacgcggccggcctcgtagcggtagctgaagctcacgtgcagcacgccgccgt
cctcgtacttctcgatgcgggtgttggtgtagccgccgttgttgatggcgtgcaggaaggggttctcgta
gccgctggggtaggtgccgaagtggtagaagccgtagcccatcacgtggctcagcaggtaggggctgaag
gtcagggcgcctttggtgctcttcatcttgttggtcatgcggccctgctcgggggtgccctctccgccgc
ccaccagctcgaactccacgccgttcagggtgccggtgatgcggcactcgatcttcatggcgggcatggt
ggctagcctagccagcttgggtctccctatagtgagtcgtattaatttcgataagccagtaagcagtggg
ttctctagttagccagagagctctgcttatatagacctcccaccgtacacgcctaccgcccatttgcgtc
aatggggcggagttgttacgacattttggaaagtcccgttgattttggtgccaaaacaaactcccattga
cgtcaatggggtggagacttggaaatccccgtgagtcaaaccgctatccacgcccattgatgtactgcca
aaaccgcatcaccatggtaatagcgatgactaatacgtagatgtactgccaagtaggaaagtcccataag
gtcatgtactgggcataatgccaggcgggccatttaccgtcattgacgtcaatagggggcgtacttggca
tatgatacacttgatgtactgccaagtgggcagtttaccgtaaatactccacccattgacgtcaatggaa
agtccctattggcgttactatgggaacatacgtcattattgacgtcaatgggcgggggtcgttgggcggt
cagccaggcgggccatttaccgtaagttatgtaacgcggaactccatatatgggctatgaactaatgacc
ccgtaattgattactattaataactacaataatcaatgtcaacgcgtatatctggcccgtacatcgcgaa
gcagcgcaaaacgcctaaccctaagcagattcttcatgcaattaagcttcgcggtgcttcttcagtacgc
tacggcaaatgtcatcgacgtttttatccggaaactgctgtctggctttttttgatttcagaattagcct
gacgggcaatgctgcgaagggcgttttcctgctgaggtgtcattgaacaagtcccatgtcggcaagcata
agcacacagaatatgaagcccgctgccagaaaaatgcattccgtggttgtcatacctggtttctctcatc
tgcttctgctttcgccaccatcatttccagcttttgtgaaagggatgcggctaacgtatgaaattcttcg
tctgtttctactggtattggcacaaacctgattccaatttgagcaaggctatgtgccatctcgatactcg
ttcttaactcaacagaagatgctttgtgcatacagcccctcgtttattatttatctcctcagccagccgc
tgtgctttcagtggatttcggataacagaaaggccgggaaatacccagcctcgctttgtaacggagtaga
cgaaagtgattgcgcctacccggatattatcgtgaggatgcgtcatcgccattgctccccaaatacaaaa
ccaatttcagccagtgcctcgtccattttttcgatgaactccggcacgatctcgtcaaaactcgccatgt
acttttcatcccgctcaatcacgacataatgcaggccttcacgcttcatacgcgggtcatagttggcaaa
gtaccaggcattttttcgcgtcacccacatgctgtactgcacctgggccatgtaagctgactttatggcc
tcgaaaccaccgagccggaacttcatgaaatcccgggaggtaaacgggcatttcagttcaaggccgttgc
cgtcactgcataaaccatcgggagagcaggcggtacgcatactttcgtcgcgatagatgatcggggattc
agtaacattcacgccggaagtgaattcaaacagggttctggcgtcgttctcgtactgttttccccaggcc
agtgctttagcgttaacttccggagccacaccggtgcaaacctcagcaagcagggtgtggaagtaggaca
ttttcatgtcaggccacttctttccggagcggggttttgctatcacgttgtgaacttctgaagcggtgat
gacgccgagccgtaatttgtgccacgcatcatccccctgttcgacagctctcacatcgatcccggtacgc
tgcaggataatgtccggtgtcatgctgccaccttctgctctgcggctttctgtttcaggaatccaagagc
ttttactgcttcggcctgtgtcagttctgacgatgcacgaatgtcgcggcgaaatatctgggaacagagc
ggcaataagtcgtcatcccatgttttatccagggcgatcagcagagtgttaatctcctgcatggtttcat
cgttaaccggagtgatgtcgcgttccggctgacgttctgcagtgtatgcagtattttcgacaatgcgctc
ggcttcatccttgtcatagataccagcaaatccgaagcggccgcggaacaacaacaattgcattcatttt
atgtttcaggttcagggggaggtgtggtcctgcgattccatcgagtgcacctacaccctgctgaagaccc
tatgcggcctaagagacctgctaccaatgaattaaaaaaaaatgattaataaaaaatcacttacttgaaa
tcagcaataaggtctctgttgaaattttctcccagcagcacctcacttccctcttcccaactctggtatt
ctaaaccccgttcagcggcatactttctccatactttaaaggggatgtcaaattttagctcctctcctgt
acccacaatcttcatgtctttcttcccagatgaccaagagagtccggctcagtgactccttcaaccctgt
ctacccctatgaagatgaaagcacctcccaacaccccttttataacccagggtttatttccccaaatggc
ttcacacaaagcccagacggagttcttactttaaaatgtttaaccccactaacaaccacaggcggatctc
tacagctaaaagtgggagggggacttacagtggatgacactgatggtaccttacaagaaaacatacgtgc
tacagcacccattactaaaaataatcactctgtagaactatccattggaaatggattagaaactcaaaac
aataaactatgtgccaaattgggaaatgggttaaaatttaacaacggtgacatttgtataaaggatagta
ttaacaccttatggactggaataaaccctccacctaactgtcaaattgtggaaaacactaatacaaatga
tggcaaacttactttagtattagtaaaaaatggagggcttgttaatggctacgtgtctctagttggtgta
tcagacactgtgaaccaaatgttcacacaaaagacagcaaacatccaattaagattatattttgactctt
ctggaaatctattaactgaggaatcagacttaaaaattccacttaaaaataaatcttctacagcgaccag
tgaaactgtagccagcagcaaagcctttatgccaagtactacagcttatcccttcaacaccactactagg
gatagtgaaaactacattcatggaatatgttactacatgactagttatgatagaagtctatttcccttga
acatttctataatgctaaacagccgtatgatttcttccaatgttgcctatgccatacaatttgaatggaa
tctaaatgcaagtgaatctccagaaagcaacatagctacgctgaccacatccccctttttcttttcttac
attacagaagacgacaactaaaataaagtttaagtgtttttatttaaaatcacaaaattcgagtagttat
tttgcctccaccttcccatttgacagaatacacagtcctttctccccggctggccttaaaaagcatcata
tcatgggtaacagacatattcttaggtgttatattccacacggtttcctgtcgagccaaacgctcatcag
tgatattaataaactccccgggcagctcacttaagttcatgtcgctgtccagctgctgagccacaggctg
ctgtccaacttgcggttgcttaacgggcggcgaaggagaagtccacgcctacatgggggtagagtcataa
tcgtgcatcaggatagggcggtggtgctgcagcagcgcgcgaataaactgctgccgccgccgctccgtcc
tgcaggaatacaacatggcagtggtctcctcagcgatgattcgcaccgcccgcagcataaggcgccttgt
cctccgggcacagcagcgcaccctgatctcacttaaatcagcacagtaactgcagcacagcaccacaata
ttgttcaaaatcccacagtgcaaggcgctgtatccaaagctcatggcggggaccacagaacccacgtggc
catcataccacaagcgcaggtagattaagtggcgacccctcataaacacgctggacataaacattacctc
ttttggcatgttgtaattcaccacctcccggtaccatataaacctctgattaaacatggcgccatccacc
accatcctaaaccagctggccaaaacctgcccgccggctatacactgcagggaaccgggactggaacaat
gacagtggagagcccaggactcgtaaccatggatcatcatgctcgtcatgatgtcaatgttggcacaaca
caggcacacgtgcatacacttcctcaggattacaagctcctcccgcgttagaaccatatcccagggaaca
acccattcctgaatcagcgtaaatcccacactgcagggaagacctcgcacgtaactcacgttgtgcattg
tcaaagtgttacattcgggcagcagcggatgatcctccagtatggtagcgcgggtttctgtctcaaaagg
aggtagacgatccctactgtacggagtgcgccgagacaaccgagatcgtgttggtcgtagtgtcatgcca
aatggaacgccggacgtagtcattctcgtattttgtatagcaaaacgcggccctggcagaacacactctt
cttcgccttctatcctgccgcttagcgtgttccgtgtgatagttcaagtacagccacactcttaagttgg
tcaaaagaatgctggcttcagttgtaatcaaaactccatcgcatctaattgttctgaggaaatcatccac
ggtagcatatgcaaatcccaaccaagcaatgcaactggattgcgtttcaagcaggagaggagagggaaga
gacggaagaaccatgttaatttttattccaaacgatctcgcagtacttcaaattgtagatcgcgcagatg
gcatctctcgcccccactgtgttggtgaaaaagcacagctaaatcaaaagaaatgcgattttcaaggtgc
tcaacggtggcttccaacaaagcctccacgcgcacatccaagaacaaaagaataccaaaagaaggagcat
tttctaactcctcaatcatcatattacattcctgcaccattcccagataattttcagctttccagccttg
aattattcgtgtcagttcttgtggtaaatccaatccacacattacaaacaggtcccggagggcgccctcc
accaccattcttaaacacaccctcataatgacaaaatatcttgctcctgtgtcacctgtagcgaattgag
aatggcaacatcaattgacatgcccttggctctaagttcttctttaagttctagttgtaaaaactctctc
atattatcaccaaactgcttagccagaagccccccgggaacaagagcaggggacgctacagtgcagtaca
agcgcagacctccccaattggctccagcaaaaacaagattggaataagcatattgggaaccaccagtaat
atcatcgaagttgctggaaatataatcaggcagagtttcttgtagaaattgaataaaagaaaaatttgcc
aaaaaaacattcaaaacctctgggatgcaaatgcaataggttaccgcgctgcgctccaacattgttagtt
ttgaattagtctgcaaaaataaaaaaaaaacaagcgtcatatcatagtagcctgacgaacaggtggataa
atcagtctttccatcacaagacaagccacagggtctccagctcgaccctcgtaaaacctgtcatcgtgat
taaacaacagcaccgaaagttcctcgcggtgaccagcatgaataagtcttgatgaagcatacaatccaga
catgttagcatcagttaaggagaaaaaacagccaacatagcctttgggtataattatgcttaatcgtaag
tatagcaaagccacccctcgcggatacaaagtaaaaggcacaggagaataaaaaatataattatttctct
getgetgtttaggcaacgtcgcccccggtccctctaaatacacatacaaagcctcatcagecatggetta
ccagagaaagtacagcgggcacacaaaccacaagctctaaagtcactctccaacctctccacaatatata
tacacaagccctaaactgacgtaatgggactaaagtgtaaaaaatcccgccaaacccaacacacaccccg
aaactgcgtcaccagggaaaagtacagtttcacttccgcaatcccaacaagcgtcacttcctctttctca
cggtacgtcacatcccattaacttacaacgtcattttcccacggccgcgcegeeccttttaaccgttaac
cccacagccaatcaccacacggcccacactttttaaaatcacctcatttacatattggcaccattccatc
tataaggtatattattgatgatgtt (SEQ ID NO: 173)
The nucleotide sequence of pAd35GFP-5E4-CCDb:
CATCATCAATAATATACCTTATAGATGGAATGGTGCCAATATGTAAATGAGGTGATTTTAAAAAGTGTGG
GCCGTGTGGTGATTGGCTGTGGGGTTAACGGTTAAAAGGGGCGGCGCGGCCGTGGGAAAATGACGTTTTA
TGGGGGTGGAGTTTTTTTGCAAGTTGTCGCGGGAAATGTTACGCATAAAAAGGCTTCTTTTCTCACGGAA
CTACTTAGTTTTCCCACGGTATTTAACAGGAAATGAGGTAGTTTTGACCGGATGCAAGTGAAAATTGCTG
ATTTTCGCGCGAAAACTGAATGAGGAAGTGTTTTTCTGAATAATGTGGTATTTATGGCAGGGTGGAGTAT
TTGTTCAGGGCCAGGTAGACTTTGACCCATTACGTGGAGGTTTCGATTACCGTGTTTTTTACCTGAATTT
CCGCGTACCGTGTCAAAGTCTTCTGTTTTTACGTAGGTGTCAGCTGATCGCTAGGGTATTTGTTCAAAAA
AAAGCCCGCTCATTAGGCGGGCTGGGTTATATTCCCCAGAACATCAGGTTAATGGCGTTTTTGATGTCAT
TTTCGCGGTGGCTGAGATCAGCCACTTCTTCCCCGATAACGGAGACCGGCACACTGGCCATATCGGTGGT
CATCATGCGCCAGCTTTCATCCCCGATATGCACCACCGGGTAAAGTTCACGGGAGACTTTATCTGACAGC
AGACGTGCACTGGCCAGGGGGATCACCATCCGTCGCCCGGGCGTGTCAATAATATCACTCTGTACATCCA
CAAACAGACGATAACGGCTCTCTCTTTTATAGGTGTAAACCTTAAACTGCATAATCTGACCTCCTGGTTA
TGTGTGGGAGGGCTAACCATGGATCCATGGTTACCAATGCTTAATCAGTGAGGCACCTATCTCAGCGATC
TGTCTATTTCGTTCATCCATAGTTGCCTGACTCCCCGTCGTGTAGATAACTACGATACGGGAGGGCTTAC
CATCTGGCCCCAGTGCTGCAATGATACCGCGAGACCCACGCTCACCGGCTCCAGATTTATCAGCAATAAA
CCAGCCAGCCGGAAGGGCCGAGCGCAGAAGTGGTCCTGCAACTTTATCCGCCTCCATCCAGTCTATTAAT
TGTTGCCGGGAAGCTAGAGTAAGTAGTTCGCCAGTTAATAGTTTGCGCAACGTTGTTGCCATTGCTGCAG
GCATCGTGGTGTCACGCTCGTCGTTTGGTATGGCTTCATTCAGCTCCGGTTCCCAACGATCAAGGCGAGT
TACATGATCCCCCATGTTGTGCAAAAAAGCGGTTAGCTCCTTCGGTCCTCCGATCGTTGTCAGAAGTAAG
TTGGCCGCAGTGTTATCACTCATGGTTATGGCAGCACTGCATAATTCTCTTACTGTCATGCCATCCGTAA
GATGCTTTTCTGTGACTGGTGAGTACTCAACCAAGTCATTCTGAGAATAGTGTATGCGGCGACCGAGTTG
CTCTTGCCCGGCGTCAACACGGGATAATACCGCGCCACATAGCAGAACTTTAAAAGTGCTCATCATTGGA
AAACGTTCTTCGGGGCGAAAACTCTCAAGGATCTTACCGCTGTTGAGATCCAGTTCGATGTAACCCACTC
GTGCACCCAACTGATCTTCAGCATCTTTTACTTTCACCAGCGTTTCTGGGTGAGCAAAAACAGGAAGGCA
AAATGCCGCAAAAAAGGGAATAAGGGCGACACGGAAATGTTGAATACTCATACTCTTCCTTTTTCAATAT
TATTGAAGCATTTATCAGGGTTATTGTCTCATGAGCGGATACATATTTGAATGTATTTAGAAAAATAAAC
AAAGCTACCTTAAGAGAGTGTCAGGAATGTTTATGCCTTACCAGTGTAACATGAATCATGTGAAAGTGTT
GTTGGAACCAGATGCCTTTTCCAGAATGAGCCTAACAGGAATCTTTGACATGAACACGCAAATCTGGAAG
ATCCTGAGGTATGATGATACGAGATCGAGGGTGCGCGCATGCGAATGCGGAGGCAAGCATGCCAGGTTCC
AGCCGGTGTGTGTAGATGTGACCGAAGATCTCAGACCGGATCATTTGGTTATTGCCCGCACTGGAGCAGA
GTTCGGATCCAGTGGAGAAGAAACTGACTAAGGTGAGTATTGGGAAAACTTTGGGGTGGGATTTTCAGAT
GGACAGATTGAGTAAAAATTTGTTTTTTCTGTCTTGCAGCTGACATGAGTGGAAATGCTTCTTTTAAGGG
GGGAGTCTTCAGCCCTTATCTGACAGGGCGTCTCCCATCCTGGGCAGGAGTTCGTCAGAATGTTATGGGA
TCTACTGTGGATGGAAGACCCGTTCAACCCGCCAATTCTTCAACGCTGACCTATGCTACTTTAAGTTCTT
CACCTTTGGACGCAGCTGCAGCCGCTGCCGCCGCCTCTGTCGCCGCTAACACTGTGCTTGGAATGGGTTA
CTATGGAAGCATCGTGGCTAATTCCACTTCCTCTAATAACCCTTCTACACTGACTCAGGACAAGTTACTT
GTCCTTTTGGCCCAGCTGGAGGCTTTGACCCAACGTCTGGGTGAACTTTCTCAGCAGGTGGCCGAGTTGC
GAGTACAAACTGAGTCTGCTGTCGGCACGGCAAAGTCTAAATAAAAAAAATTCCAGAATCAATGAATAAA
TAAACGAGCTTGTTGTTGATTTAAAATCAAGTGTTTTTATTTCATTTTTCGCGCACGGTATGCCCTGGAC
CACCGATCTCGATCATTGAGAACTCGGTGGATTTTTTCCAGAATCCTATAGAGGTGGGATTGAATGTTTA
GATACATGGGCATTAGGCCGTCTTTGGGGTGGAGATAGCTCCATTGAAGGGATTCATGCTCCGGGGTAGT
GTTGTAAATCACCCAGTCATAACAAGGTCGCAGTGCATGGTGTTGCACAATATCTTTTAGAAGTAGGCTG
ATTGCCACAGATAAGCCCTTGGTGTAGGTGTTTACAAACCGGTTGAGCTGGGAGGGGTGCATTCGAGGTG
AAATTATGTGCATTTTGGATTGGATTTTTAAGTTGGCAATATTGCCGCCAAGATCCCGTCTTGGGTTCAT
GTTATGAAGGACTACCAAGACGGTGTATCCGGTACATTTAGGAAATTTATCGTGCAGCTTGGATGGAAAA
GCGTGGAAAAATTTGGAGACACCCTTGTGTCCTCCGAGATTTTCCATGCACTCATCCATGATAATAGCAA
TGGGGCCGTGGGCAGCGGCGCGGGCAAACACGTTCCGTGGGTCTGACACATCATAGTTATGTTCCTGAGT
TAAATCATCATAAGCCATTTTAATGAATTTGGGGCGGAGCGTACCAGATTGGGGTATGAATGTTCCTTCG
GGCCCCGGAGCATAGTTCCCCTCACAGATTTGCATTTCCCAAGCTTTCAGTTCTGAGGGTGGAATCATGT
CCACCTGGGGGGCTATGAAGAACACCGTTTCGGGGGCGGGGGTGATTAGTTGGGATGATAGCAAGTTTCT
GAGCAATTGAGATTTGCCACATCCGGTGGGGCCATAAATAATTCCGATTACAGGTTGCAGGTGGTAGTTT
AGGGAACGGCAACTGCCGTCTTCTCGAAGCAAGGGGGCCACCTCGTTCATCATTTCCCTTACATGCATAT
TTTCCCGCACCAAATCCATTAGGAGGCGCTCTCCTCCTAGTGATAGAAGTTCTTGTAGTGAGGAAAAGTT
TTTCAGCGGTTTTAGACCGTCAGCCATGGGCATTTTGGAAAGAGTTTGCTGCAAAAGTTCTAGTCTGTTC
CACAGTTCAGTGATGTGTTCTATGGCATCTCGATCCAGCAGACCTCCTCGTTTCGCGGGTTTGGACGGCT
CCTGGAGTAGGGTATGAGACGATGGGCGTCCAGCGCTGCCAGGGTTCGGTCCTTCCAGGGTCTCAGTGTT
CGAGTCAGGGTTGTTTCCGTCACAGTGAAGGGGTGTGCGCCTGCTTGGGCGCTTGCCAGGGTGCGCTTCA
GACTCATTCTGCTGGTGGAGAACTTCTGTCGCTTGGCGCCCTGTATGTCGGCCAAGTAGCAGTTTACCAT
GAGTTCGTAGTTGAGCGCCTCGGCTGCGTGGCCTTTGGCGCGGAGCTTACCTTTGGAAGTTTTCTTGCAT
ACCGGGCAGTATAGGCATTTCAGCGCATACAGCTTGGGCGCAAGGAAAATGGATTCTGGGGAGTATGCAT
CCGCGCCGCAGGAGGCGCAAACAGTTTCACATTCCACCAGCCAGGTTAAATCCGGTTCATTGGGGTCAAA
AACAAGTTTTCCGCCATATTTTTTGATGCGTTTCTTACCTTTGGTCTCCATAAGTTCGTGTCCTCGTTGA
GTGACAAACAGGCTGTCCGTATCTCCGTAGACTGATTTTACAGGCCTCTTCTCCAGTGGAGTGCCTCGGT
CTTCTTCGTACAGGAACTCTGACCACTCTGATACAAAGGCGCGCGTCCAGGCCAGCACAAAGGAGGCTAT
GTGGGAGGGGTAGCGATCGTTGTCAACCAGGGGGTCCACCTTTTCCAAAGTATGCAAACACATGTCACCC
TCTTCAACATCCAGGAATGTGATTGGCTTGTAGGTGTATTTCACGTGACCTGGGGTCCCCGCTGGGGGGG
TATAAAAGGGGGCGGTTCTTTGCTCTTCCTCACTGTCTTCCGGATCGCTGTCCAGGAACGTCAGCTGTTG
GGGTAGGTATTCCCTCTCGAAGGCGGGCATGACCTCTGCACTCAGGTTGTCAGTTTCTAAGAACGAGGAG
GATTTGATATTGACAGTGCCGGTTGAGATGCCTTTCATGAGGTTTTCGTCCATTTGGTCAGAAAACACAA
TTTTTTTATTGTCAAGTTTGGTGGCAAATGATCCATACAGGGCGTTGGATAAAAGTTTGGCAATGGATCG
CATGGTTTGGTTCTTTTCCTTGTCCGCGCGCTCTTTGGCGGCGATGTTGAGTTGGACATACTCGCGTGCC
AGGCACTTCCATTCGGGGAAGATAGTTGTTAATTCATCTGGCACGATTCTCACTTGCCACCCTCGATTAT
GCAAGGTAATTAAATCCACACTGGTGGCCACCTCGCCTCGAAGGGGTTCATTGGTCCAACAGAGCCTACC
TCCTTTCCTAGAACAGAAAGGGGGAAGTGGGTCTAGCATAAGTTCATCGGGAGGGTCTGCATCCATGGTA
AAGATTCCCGGAAGTAAATCCTTATCAAAATAGCTGATGGGAGTGGGGTCATCTAAGGCCATTTGCCATT
CTCGAGCTGCCAGTGCGCGCTCATATGGGTTAAGGGGACTGCCCCAGGGCATGGGATGGGTGAGAGCAGA
GGCATACATGCCACAGATGTCATAGACGTAGATGGGATCCTCAAAGATGCCTATGTAGGTTGGATAGCAT
CGCCCCCCTCTGATACTTGCTCGCACATAGTCATATAGTTCATGTGATGGCGCTAGCAGCCCCGGACCCA
AGTTGGTGCGATTGGGTTTTTCTGTTCTGTAGACGATCTGGCGAAAGATGGCGTGAGAATTGGAAGAGAT
GGTGGGTCTTTGAAAAATGTTGAAATGGGCATGAGGTAGACCTACAGAGTCTCTGACAAAGTGGGCATAA
GATTCTTGAAGCTTGGTTACCAGTTCGGCGGTGACAAGTACGTCTAGGGCGCAGTAGTCAAGTGTTTCTT
GAATGATGTCATAACCTGGTTGGTTTTTCTTTTCCCACAGTTCGCGGTTGAGAAGGTATTCTTCGCGATC
CTTCCAGTACTCTTCTAGCGGAAACCCGTCTTTGTCTGCACGGTAAGATCCTAGCATGTAGAACTGATTA
ACTGCCTTGTAAGGGCAGCAGCCCTTCTCTACGGGTAGAGAGTATGCTTGAGCAGCTTTTCGTAGCGAAG
CGTGAGTAAGGGCAAAGGTGTCTCTGACCATGACTTTGAGAAATTGGTATTTGAAGTCCATGTCGTCACA
GGCTCCCTGTTCCCAGAGTTGGAAGTCTACCCGTTTCTTGTAGGCGGGGTTGGGCAAAGCGAAAGTAACA
TCATTGAAGAGAATCTTACCGGCTCTGGGCATAAAATTGCGAGTGATGCGGAAAGGCTGTGGTACTTCCG
CTCGATTGTTGATCACCTGGGCAGCTAGGACGATTTCGTCGAAACCGTTGATGTTGTGTCCTACGATGTA
TAATTCTATGAAACGCGGCGTGCCTCTGACGTGAGGTAGCTTACTGAGCTCATCAAAGGTTAGGTCTGTG
GGGTCAGATAAGGCGTAGTGTTCGAGAGCCCATTCGTGCAGGTGAGGATTTGCATGTAGGAATGATGACC
AAAGATCTACCGCCAGTGCTGTTTGTAACTGGTCCCGATACTGACGAAAATGCCGGCCAATTGCCATTTT
TTCTGGAGTGACACAGTAGAAGGTTCTGGGGTCTTGTTGCCATCGATCCCACTTGAGTTTAATGGCTAGA
TCGTGGGCCATGTTGACGAGACGCTCTTCTCCTGAGAGTTTCATGACCAGCATGAAAGGAACTAGTTGTT
TGCCAAAGGATCCCATCCAGGTGTAAGTTTCCACATCGTAGGTCAGGAAGAGTCTTTCTGTGCGAGGATG
AGAGCCGATCGGGAAGAACTGGATTTCCTGCCACCAGTTGGAGGATTGGCTGTTGATGTGATGGAAGTAG
AAGTTTCTGCGGCGCGCCGAGCATTCGTGTTTGTGCTTGTACAGACGGCCGCAGTAGTCGCAGCGTTGCA
CGGGTTGTATCTCGTGAATGAGCTGTACCTGGCTTCCCTTGACGAGAAATTTCAGTGGGAAGCCGAGGCC
TGGCGATTGTATCTCGTGCTCTTCTATATTCGCTGTATCGGCCTGTTCATCTTCTGTTTCGATGGTGGTC
ATGCTGACGAGCCCCCGCGGGAGGCAAGTCCAGACCTCGGCGCGGGAGGGGCGGAGCTGAAGGACGAGAG
CGCGCAGGCTGGAGCTGTCCAGAGTCCTGAGACGCTGCGGACTCAGGTTAGTAGGTAGGGACAGAAGATT
AACTTGCATGATCTTTTCCAGGGCGTGCGGGAGGTTCAGATGGTACTTGATTTCCACAGGTTCGTTTGTA
GAGACGTCAATGGCTTGCAGGGTTCCGTGTCCTTTGGGCGCCACTACCGTACCTTTGTTTTTTCTTTTGA
TCGGTGGTGGCTCTCTTGCTTCTTGCATGCTCAGAAGCGGTGACGGGGACGCGCGCCGGGCGGCAGCGGT
TGTTCCGGACCCGGGGGCATGGCTGGTAGTGGCACGTCGGCGCCGCGCACGGGCAGGTTCTGGTATTGCG
CTCTGAGAAGACTTGCGTGCGCCACCACGCGTCGATTGACGTCTTGTATCTGACGTCTCTGGGTGAAAGC
TACCGGCCCCGTGAGCTTGAACCTGAAAGAGAGTTCAACAGAATCAATTTCGGTATCGTTAACGGCAGCT
TGTCTCAGTATTTCTTGTACGTCACCAGAGTTGTCCTGGTAGGCGATCTCCGCCATGAACTGCTCGATTT
CTTCCTCCTGAAGATCTCCGCGACCCGCTCTTTCGACGGTGGCCGCGAGGTCATTGGAGATACGGCCCAT
GAGTTGGGAGAATGCATTCATGCCCGCCTCGTTCCAGACGCGGCTGTAAACCACGGCCCCCTCGGAGTCT
CTTGCGCGCATCACCACCTGAGCGAGGTTAAGCTCCACGTGTCTGGTGAAGACCGCATAGTTGCATAGGC
GCTGAAAAAGGTAGTTGAGTGTGGTGGCAATGTGTTCGGCGACGAAGAAATACATGATCCATCGTCTCAG
CGGCATTTCGCTAACATCGCCCAGAGCTTCCAAGCGCTCCATGGCCTCGTAGAAGTCCACGGCAAAATTA
AAAAACTGGGAGTTTCGCGCGGACACGGTCAATTCCTCCTCGAGAAGACGGATGAGTTCGGCTATGGTGG
CCCGTACTTCGCGTTCGAAGGCTCCCGGGATCTCTTCTTCCTCTTCTATCTCTTCTTCCACTAACATCTC
TTCTTCGTCTTCAGGCGGGGGCGGAGGGGGCACGCGGCGACGTCGACGGCGCACGGGCAAACGGTCGATG
AATCGTTCAATGACCTCTCCGCGGCGGCGGCGCATGGTTTCAGTGACGGCGCGGCCGTTCTCGCGCGGTC
GCAGAGTAAAAACACCGCCGCGCATCTCCTTAAAGTGGTGACTGGGAGGTTCTCCGTTTGGGAGGGAGAG
GGCGCTGATTATACATTTTATTAATTGGCCCGTAGGGACTGCGCGCAGAGATCTGATCGTGTCAAGATCC
ACGGGATCTGAAAACCTTTCGACGAAAGCGTCTAACCAGTCACAGTCACAAGGTAGGCTGAGTACGGCTT
CTTGTGGGCGGGGGTGGTTATGTGTTCGGTCTGGGTCTTCTGTTTCTTCTTCATCTCGGGAAGGTGAGAC
GATGCTGCTGGTGATGAAATTAAAGTAGGCAGTTCTAAGACGGCGGATGGTGGCGAGGAGCACCAGGTCT
TTGGGTCCGGCTTGCTGGATACGCAGGCGATTGGCCATTCCCCAAGCATTATCCTGACATCTAGCAAGAT
CTTTGTAGTAGTCTTGCATGAGCCGTTCTACGGGCACTTCTTCCTCACCCGTTCTGCCATGCATACGTGT
GAGTCCAAATCCGCGCATTGGTTGTACCAGTGCCAAGTCAGCTACGACTCTTTCGGCGAGGATGGCTTGC
TGTACTTGGGTAAGGGTGGCTTGAAAGTCATCAAAATCCACAAAGCGGTGGTAAGCCCCTGTATTAATGG
TGTAAGCACAGTTGGCCATGACTGACCAGTTAACTGTCTGGTGACCAGGGCGCACGAGCTCGGTGTATTT
AAGGCGCGAATAGGCGCGGGTGTCAAAGATGTAATCGTTGCAGGTGCGCACCAGATACTGGTACCCTATA
AGAAAATGCGGCGGTGGTTGGCGGTAGAGAGGCCATCGTTCTGTAGCTGGAGCGCCAGGGGCGAGGTCTT
CCAACATAAGGCGGTGATAGCCGTAGATGTACCTGGACATCCAGGTGATTCCTGCGGCGGTAGTAGAAGC
CCGAGGAAACTCGCGTACGCGGTTCCAAATGTTGCGTAGCGGCATGAAGTAGTTCATTGTAGGCACGGTT
TGACCAGTGAGGCGCGCGCAGTCATTGATGCTCTATAGACACGGAGAAAATGAAAGCGTTCAGCGACTCG
ACTCCGTAGCCTGGAGGAACGTGAACGGGTTGGGTCGCGGTGTACCCCGGTTCGAGACTTGTACTCGAGC
CGGCCGGAGCCGCGGCTAACGTGGTATTGGCACTCCCGTCTCGACCCAGCCTACAAAAATCCAGGATACG
GAATCGAGTCGTTTTGCTGGTTTCCGAATGGCAGGGAAGTGAGTCCTATTTTTTTTTTTTTTGCCGCTCA
GATGCATCCCGTGCTGCGACAGATGCGCCCCCAACAACAGCCCCCCTCGCAGCAGCAGCAGCAGCAACCA
CAAAAGGCTGTCCCTGCAACTACTGCAACTGCCGCCGTGAGCGGTGCGGGACAGCCCGCCTATGATCTGG
ACTTGGAAGAGGGCGAAGGACTGGCACGTCTAGGTGCGCCTTCGCCCGAGCGGCATCCGCGAGTTCAACT
GAAAAAAGATTCTCGCGAGGCGTATGTGCCCCAACAGAACCTATTTAGAGACAGAAGCGGCGAGGAGCCG
GAGGAGATGCGAGCTTCCCGCTTTAACGCGGGTCGTGAGCTGCGTCACGGTTTGGACCGAAGACGAGTGT
TGCGAGACGAGGATTTCGAAGTTGATGAAGTGACAGGGATCAGTCCTGCCAGGGCACACGTGGCTGCAGC
CAACCTTGTATCGGCTTACGAGCAGACAGTAAAGGAAGAGCGTAACTTCCAAAAGTCTTTTAATAATCAT
GTGCGAACCCTGATTGCCCGCGAAGAAGTTACCCTTGGTTTGATGCATTTGTGGGATTTGATGGAAGCTA
TCATTCAGAACCCTACTAGCAAACCTCTGACCGCCCAGCTGTTTCTGGTGGTGCAACACAGCAGAGACAA
TGAGGCTTTCAGAGAGGCGCTGCTGAACATCACCGAACCCGAGGGGAGATGGTTGTATGATCTTATCAAC
ATTCTACAGAGTATCATAGTGCAGGAGCGGAGCCTGGGCCTGGCCGAGAAGGTAGCTGCCATCAATTACT
CGGTTTTGAGCTTGGGAAAATATTACGCTCGCAAAATCTACAAGACTCCATACGTTCCCATAGACAAGGA
GGTGAAGATAGATGGGTTCTACATGCGCATGACGCTCAAGGTCTTGACCCTGAGCGATGATCTTGGGGTG
TATCGCAATGACAGAATGCATCGCGCGGTTAGCGCCAGCAGGAGGCGCGAGTTAAGCGACAGGGAACTGA
TGCACAGTTTGCAAAGAGCTCTGACTGGAGCTGGAACCGAGGGTGAGAATTACTTCGACATGGGAGCTGA
CTTGCAGTGGCAGCCTAGTCGCAGGGCTCTGAGCGCCGCGACGGCAGGATGTGAGCTTCCTTACATAGAA
GAGGCGGATGAAGGCGAGGAGGAAGAGGGCGAGTACTTGGAAGACTGATGGCACAACCCGTGTTTTTTGC
TAGATGGAACAGCAAGCACCGGATCCCGCAATGCGGGCGGCGCTGCAGAGCCAGCCGTCCGGCATTAACT
CCTCGGACGATTGGACCCAGGCCATGCAACGTATCATGGCGTTGACGACTCGCAACCCCGAAGCCTTTAG
ACAGCAACCCCAGGCCAACCGTCTATCGGCCATCATGGAAGCTGTAGTGCCTTCCCGATCTAATCCCACT
CATGAGAAGGTCCTGGCCATCGTGAACGCGTTGGTGGAGAACAAAGCTATTCGTCCAGATGAGGCCGGAC
TGGTATACAACGCTCTCTTAGAACGCGTGGCTCGCTACAACAGTAGCAATGTGCAAACCAATTTGGACCG
TATGATAACAGATGTACGCGAAGCCGTGTCTCAGCGCGAAAGGTTCCAGCGTGATGCCAACCTGGGTTCG
CTGGTGGCGTTAAATGCTTTCTTGAGTACTCAGCCTGCTAATGTGCCGCGTGGTCAACAGGATTATACTA
ACTTTTTAAGTGCTTTGAGACTGATGGTATCAGAAGTACCTCAGAGCGAAGTGTATCAGTCCGGTCCTGA
TTACTTCTTTCAGACTAGCAGACAGGGCTTGCAGACGGTAAATCTGAGCCAAGCTTTTAAAAACCTTAAA
GGTTTGTGGGGAGTGCATGCCCCGGTAGGAGAAAGAGCAACCGTGTCTAGCTTGTTAACTCCGAACTCCC
GCCTGTTATTACTGTTGGTAGCTCCTTTCACCGACAGCGGTAGCATCGACCGTAATTCCTATTTGGGTTA
CCTACTAAACCTGTATCGCGAAGCCATAGGGCAAAGTCAGGTGGACGAGCAGACCTATCAAGAAATTACC
CAAGTCAGTCGCGCTTTGGGACAGGAAGACACTGGCAGTTTGGAAGCCACTCTGAACTTCTTGCTTACCA
ATCGGTCTCAAAAGATCCCTCCTCAATATGCTCTTACTGCGGAGGAGGAGAGGATCCTTAGATATGTGCA
GCAGAGCGTGGGATTGTTTCTGATGCAAGAGGGGGCAACTCCGACTGCAGCACTGGACATGACAGCGCGA
AATATGGAGCCCAGCATGTATGCCAGTAACCGACCTTTCATTAACAAACTGCTGGACTACTTGCACAGAG
CTGCCGCTATGAACTCTGATTATTTCACCAATGCCATCTTAAACCCGCACTGGCTGCCCCCACCTGGTTT
CTACACGGGCGAATATGACATGCCCGACCCTAATGACGGATTTCTGTGGGACGACGTGGACAGCGATGTT
TTTTCACCTCTTTCTGATCATCGCACGTGGAAAAAGGAAGGCGGTGATAGAATGCATTCTTCTGCATCGC
TGTCCGGGGTCATGGGTGCTACCGCGGCTGAGCCCGAGTCTGCAAGTCCTTTTCCTAGTCTACCCTTTTC
TCTACACAGTGTACGTAGCAGCGAAGTGGGTAGAATAAGTCGCCCGAGTTTAATGGGCGAAGAGGAGTAC
CTAAACGATTCCTTGCTCAGACCGGCAAGAGAAAAAAATTTCCCAAACAATGGAATAGAAAGTTTGGTGG
ATAAAATGAGTAGATGGAAGACTTATGCTCAGGATCACAGAGACGAGCCTGGGATCATGGGGACTACAAG
TAGAGCGAGCCGTAGACGCCAGCGCCATGACAGACAGAGGGGTCTTGTGTGGGACGATGAGGATTCGGCC
GATGATAGCAGCGTGTTGGACTTGGGTGGGAGAGGAAGGGGCAACCCGTTTGCTCATTTGCGCCCTCGCT
TGGGTGGTATGTTGTGAAAAAAAATAAAAAAGAAAAACTCACCAAGGCCATGGCGACGAGCGTACGTTCG
TTCTTCTTTATTATCTGTGTCTAGTATAATGAGGCGAGTCGTGCTAGGCGGAGCGGTGGTGTATCCGGAG
GGTCCTCCTCCTTCGTACGAGAGCGTGATGCAGCAGCAGCAGGCGACGGCGGTGATGCAATCCCCACTGG
AGGCTCCCTTTGTGCCTCCGCGATACCTGGCACCTACGGAGGGCAGAAACAGCATTCGTTACTCGGAACT
GGCACCTCAGTACGATACCACCAGGTTGTATCTGGTGGACAACAAGTCGGCGGACATTGCTTCTCTGAAC
TATCAGAATGACCACAGCAACTTCTTGACCACGGTGGTGCAGAACAATGACTTTACCCCTACGGAAGCCA
GCACCCAGACCATTAACTTTGATGAACGATCGCGGTGGGGCGGTCAGCTAAAGACCATCATGCATACTAA
CATGCCAAACGTGAACGAGTATATGTTTAGTAACAAGTTCAAAGCGCGTGTGATGGTGTCCAGAAAACCT
CCCGACGGTGCTGCAGTTGGGGATACTTATGATCACAAGCAGGATATTTTGGAATATGAGTGGTTCGAGT
TTACTTTGCCAGAAGGCAACTTTTCAGTTACTATGACTATTGATTTGATGAACAATGCCATCATAGATAA
TTACTTGAAAGTGGGTAGACAGAATGGAGTGCTTGAAAGTGACATTGGTGTTAAGTTCGACACCAGGAAC
TTCAAGCTGGGATGGGATCCCGAAACCAAGTTGATCATGCCTGGAGTGTATACGTATGAAGCCTTCCATC
CTGACATTGTCTTACTGCCTGGCTGCGGAGTGGATTTTACCGAGAGTCGTTTGAGCAACCTTCTTGGTAT
CAGAAAAAAACAGCCATTTCAAGAGGGTTTTAAGATTTTGTATGAAGATTTAGAAGGTGGTAATATTCCG
GCCCTCTTGGATGTAGATGCCTATGAGAACAGTAAGAAAGAACAAAAAGCCAAAATAGAAGCTGCTACAG
CTGCTGCAGAAGCTAAGGCAAACATAGTTGCCAGCGACTCTACAAGGGTTGCTAACGCTGGAGAGGTCAG
AGGAGACAATTTTGCGCCAACACCTGTTCCGACTGCAGAATCATTATTGGCCGATGTGTCTGAAGGAACG
GACGTGAAACTCACTATTCAACCTGTAGAAAAAGATAGTAAGAATAGAAGCTATAATGTGTTGGAAGACA
AAATCAACACAGCCTATCGCAGTTGGTATCTTTCGTACAATTATGGCGATCCCGAAAAAGGAGTGCGTTC
CTGGACATTGCTCACCACCTCAGATGTCACCTGCGGAGCAGAGCAGGTTTACTGGTCGCTTCCAGACATG
ATGAAGGATCCTGTCACTTTCCGCTCCACTAGACAAGTCAGTAACTACCCTGTGGTGGGTGCAGAGCTTA
TGCCCGTCTTCTCAAAGAGCTTCTACAACGAACAAGCTGTGTACTCCCAGCAGCTCCGCCAGTCCACCTC
GCTTACGCACGTCTTCAACCGCTTTCCTGAGAACCAGATTTTAATCCGTCCGCCGGCGCCCACCATTACC
ACCGTCAGTGAAAACGTTCCTGCTCTCACAGATCACGGGACCCTGCCGTTGCGCAGCAGTATCCGGGGAG
TCCAACGTGTGACCGTTACTGACGCCAGACGCCGCACCTGTCCCTACGTGTACAAGGCACTGGGCATAGT
CGCACCGCGCGTCCTTTCAAGCCGCACTTTCTAAAAAAAAAATGTCCATTCTTATCTCGCCCAGTAATAA
CACCGGTTGGGGTCTGCGCGCTCCAAGCAAGATGTACGGAGGCGCACGCAAACGTTCTACCCAACATCCC
GTGCGTGTTCGCGGACATTTTCGCGCTCCATGGGGTGCCCTCAAGGGCCGCACTCGCGTTCGAACCACCG
TCGATGATGTAATCGATCAGGTGGTTGCCGACGCCCGTAATTATACTCCTACTGCGCCTACATCTACTGT
GGATGCAGTTATTGACAGTGTAGTGGCTGACGCTCGCAACTATGCTCGACGTAAGAGCCGGCGAAGGCGC
ATTGCCAGACGCCACCGAGCTACCACTGCCATGCGAGCCGCAAGAGCTCTGCTACGAAGAGCTAGACGCG
TGGGGCGAAGAGCCATGCTTAGGGCGGCCAGACGTGCAGCTTCGGGCGCCAGCGCCGGCAGGTCCCGCAG
GCAAGCAGCCGCTGTCGCAGCGGCGACTATTGCCGACATGGCCCAATCGCGAAGAGGCAATGTATACTGG
GTGCGTGACGCTGCCACCGGTCAACGTGTACCCGTGCGCACCCGTCCCCCTCGCACTTAGAAGATACTGA
GCAGTCTCCGATGTTGTGTCCCAGCGGCGAGGATGTCCAAGCGCAAATACAAGGAAGAAATGCTGCAGGT
TATCGCACCTGAAGTCTACGGCCAACCGTTGAAGGATGAAAAAAAACCCCGCAAAATCAAGCGGGTTAAA
AAGGACAAAAAAGAAGAGGAAGATGGCGATGATGGGCTGGCGGAGTTTGTGCGCGAGTTTGCCCCACGGC
GACGCGTGCAATGGCGTGGGCGCAAAGTTCGACATGTGTTGAGACCTGGAACTTCGGTGGTCTTTACACC
CGGCGAGCGTTCAAGCGCTACTTTTAAGCGTTCCTATGATGAGGTGTACGGGGATGATGATATTCTTGAG
CAGGCGGCTGACCGATTAGGCGAGTTTGCTTATGGCAAGCGTAGTAGAATAACTTCCAAGGATGAGACAG
TGTCAATACCCTTGGATCATGGAAATCCCACCCCTAGTCTTAAACCGGTCACTTTGCAGCAAGTGTTACC
CGTAACTCCGCGAACAGGTGTTAAACGCGAAGGTGAAGATTTGTATCCCACTATGCAACTGATGGTACCC
AAACGCCAGAAGTTGGAGGACGTTTTGGAGAAAGTAAAAGTGGATCCAGATATTCAACCTGAGGTTAAAG
TGAGACCCATTAAGCAGGTAGCGCCTGGTCTGGGGGTACAAACTGTAGACATTAAGATTCCCACTGAAAG
TATGGAAGTGCAAACTGAACCCGCAAAGCCTACTGCCACCTCCACTGAAGTGCAAACGGATCCATGGATG
CCCATGCCTATTACAACTGACGCCGCCGGTCCCACTCGAAGATCCCGACGAAAGTACGGTCCAGCAAGTC
TGTTGATGCCCAATTATGTTGTACACCCATCTATTATTCCTACTCCTGGTTACCGAGGCACTCGCTACTA
TCGCAGCCGAAACAGTACCTCCCGCCGTCGCCGCAAGACACCTGCAAATCGCAGTCGTCGCCGTAGACGC
ACAAGCAAACCGACTCCCGGCGCCCTGGTGCGGCAAGTGTACCGCAATGGTAGTGCGGAACCTTTGACAC
TGCCGCGTGCGCGTTACCATCCGAGTATCATCACTTAATCAATGTTGCCGCTGCCTCCTTGCAGATATGG
CCCTCACTTGTCGCCTTCGCGTTCCCATCACTGGTTACCGAGGAAGAAACTCGCGCCGTAGAAGAGGGAT
GTTGGGACGCGGAATGCGACGCTACAGGCGACGGCGTGCTATCCGCAAGCAATTGCGGGGTGGTTTTTTA
CCAGCCTTAATTCCAATTATCGCTGCTGCAATTGGCGCGATACCAGGCATAGCTTCCGTGGCGGTTCAGG
CCTCGCAACGACATTGACATTGGAAAAAAAACGTATAAATAAAAAAAAATACAATGGACTCTGACACTCC
TGGTCCTGTGACTATGTTTTCTTAGAGATGGAAGACATCAATTTTTCATCCTTGGCTCCGCGACACGGCA
CGAAGCCGTACATGGGCACCTGGAGCGACATCGGCACGAGCCAACTGAACGGGGGCGCCTTCAATTGGAG
CAGTATCTGGAGCGGGCTTAAAAATTTTGGCTCAACCATAAAAACATACGGGAACAAAGCTTGGAACAGC
AGTACAGGACAGGCGCTTAGAAATAAACTTAAAGACCAGAACTTCCAACAAAAAGTAGTCGATGGGATAG
CTTCCGGCATCAATGGAGTGGTAGATTTGGCTAACCAGGCTGTGCAGAAAAAGATAAACAGTCGTTTGGA
CCCGCCGCCAGCAACCCCAGGTGAAATGCAAGTGGAGGAAGAAATTCCTCCGCCAGAAAAACGAGGCGAC
AAGCGTCCGCGTCCCGATTTGGAAGAGACGCTGGTGACGCGCGTAGATGAACCGCCTTCTTATGAGGAAG
CAACGAAGCTTGGAATGCCCACCACTAGACCGATAGCCCCAATGGCCACCGGGGTGATGAAACCTTCTCA
GTTGCATCGACCCGTCACCTTGGATTTGCCCCCTCCCCCTGCTGCTACTGCTGTACCCGCTTCTAAGCCT
GTCGCTGCCCCGAAACCAGTCGCCGTAGCCAGGTCACGTCCCGGGGGCGCTCCTCGTCCAAATGCGCACT
GGCAAAATACTCTGAACAGCATCGTGGGTCTAGGCGTGCAAAGTGTAAAACGCCGTCGCTGCTTTTAATT
AAATATGGAGTAGCGCTTAACTTGCCTATCTGTGTATATGTGTCATTACACGCCGTCACAGCAGCAGAGG
AAAAAAGGAAGAGGTCGTGCGTCGACGCTGAGTTACTTTCAAGATGGCCACCCCATCGATGCTGCCCCAA
TGGGCATACATGCACATCGCCGGACAGGATGCTTCGGAGTACCTGAGTCCGGGTCTGGTGCAGTTCGCCC
GCGCCACAGACACCTACTTCAATCTGGGAAATAAGTTTAGAAATCCCACCGTAGCGCCGACCCACGATGT
GACCACCGACCGTAGCCAGCGGCTCATGTTGCGCTTCGTGCCCGTTGACCGGGAGGACAATACATACTCT
TACAAAGTGCGGTACACCCTGGCCGTGGGCGACAACAGAGTGCTGGATATGGCCAGCACGTTCTTTGACA
TTAGGGGCGTGTTGGACAGAGGTCCCAGTTTCAAACCCTATTCTGGTACGGCTTACAACTCTCTGGCTCC
TAAAGGCGCTCCAAATGCATCTCAATGGATTGCAAAAGGCGTACCAACTGCAGCAGCCGCAGGCAATGGT
GAAGAAGAACATGAAACAGAGGAGAAAACTGCTACTTACACTTTTGCCAATGCTCCTGTAAAAGCCGAGG
CTCAAATTACAAAAGAGGGCTTACCAATAGGTTTGGAGATTTCAGCTGAAAACGAATCTAAACCCATCTA
TGCAGATAAACTTTATCAGCCAGAACCTCAAGTGGGAGATGAAACTTGGACTGACCTAGACGGAAAAACC
GAAGAGTATGGAGGCAGGGCTCTAAAGCCTACTACTAACATGAAACCCTGTTACGGGTCCTATGCGAAGC
CTACTAATTTAAAAGGTGGTCAGGCAAAACCGAAAAACTCGGAACCGTCGAGTGAAAAAATTGAATATGA
TATTGACATGGAATTTTTTGATAACTCATCGCAAAGAACAAACTTCAGTCCTAAAATTGTCATGTATGCA
GAAAATGTAGGTTTGGAAACGCCAGACACTCATGTAGTGTACAAACCTGGAACAGAAGACACAAGTTCCG
AAGCTAATTTGGGACAACAGTCTATGCCCAACAGACCCAACTACATTGGCTTCAGAGATAACTTTATTGG
ACTCATGTACTATAACAGTACTGGTAACATGGGGGTGCTGGCTGGTCAAGCGTCTCAGTTAAATGCAGTG
GTTGACTTGCAGGACAGAAACACAGAACTTTCTTACCAACTCTTGCTTGACTCTCTGGGCGACAGAACCA
GATACTTTAGCATGTGGAATCAGGCTGTGGACAGTTATGATCCTGATGTACGTGTTATTGAAAATCATGG
TGTGGAAGATGAACTTCCCAACTATTGTTTTCCACTGGACGGCATAGGTGTTCCAACAACCAGTTACAAA
TCAATAGTTCCAAATGGAGAAGATAATAATAATTGGAAAGAACCTGAAGTAAATGGAACAAGTGAGATCG
GACAGGGTAATTTGTTTGCCATGGAAATTAACCTTCAAGCCAATCTATGGCGAAGTTTCCTTTATTCCAA
TGTGGCTCTGTATCTCCCAGACTCGTACAAATACACCCCGTCCAATGTCACTCTTCCAGAAAACAAAAAC
ACCTACGACTACATGAACGGGCGGGTGGTGCCGCCATCTCTAGTAGACACCTATGTGAACATTGGTGCCA
GGTGGTCTCTGGATGCCATGGACAATGTCAACCCATTCAACCACCACCGTAACGCTGGCTTGCGTTACCG
ATCTATGCTTCTGGGTAACGGACGTTATGTGCCTTTCCACATACAAGTGCCTCAAAAATTCTTCGCTGTT
AAAAACCTGCTGCTTCTCCCAGGCTCCTACACTTATGAGTGGAACTTTAGGAAGGATGTGAACATGGTTC
TACAGAGTTCCCTCGGTAACGACCTGCGGGTAGATGGCGCCAGCATCAGTTTCACGAGCATCAACCTCTA
TGCTACTTTTTTCCCCATGGCTCACAACACCGCTTCCACCCTTGAAGCCATGCTGCGGAATGACACCAAT
GATCAGTCATTCAACGACTACCTATCTGCAGCTAACATGCTCTACCCCATTCCTGCCAATGCAACCAATA
TTCCCATTTCCATTCCTTCTCGCAACTGGGCGGCTTTCAGAGGCTGGTCATTTACCAGACTGAAAACCAA
AGAAACTCCCTCTTTGGGGTCTGGATTTGACCCCTACTTTGTCTATTCTGGTTCTATTCCCTACCTGGAT
GGTACCTTCTACCTGAACCACACTTTTAAGAAGGTTTCCATCATGTTTGACTCTTCAGTGAGCTGGCCTG
GAAATGACAGGTTACTATCTCCTAACGAATTTGAAATAAAGCGCACTGTGGATGGCGAAGGCTACAACGT
AGCCCAATGCAACATGACCAAAGACTGGTTCTTGGTACAGATGCTCGCCAACTACAACATCGGCTATCAG
GGCTTCTACATTCCAGAAGGATACAAAGATCGCATGTATTCATTTTTCAGAAACTTCCAGCCCATGAGCA
GGCAGGTGGTTGATGAGGTCAATTACAAAGACTTCAAGGCCGTCGCCATACCCTACCAACACAACAACTC
TGGCTTTGTGGGTTACATGGCTCCGACCATGCGCCAAGGTCAACCCTATCCCGCTAACTATCCCTATCCA
CTCATTGGAACAACTGCCGTAAATAGTGTTACGCAGAAAAAGTTCTTGTGTGACAGAACCATGTGGCGCA
TACCGTTCTCGAGCAACTTCATGTCTATGGGGGCCCTTACAGACTTGGGACAGAATATGCTCTATGCCAA
CTCAGCTCATGCTCTGGACATGACCTTTGAGGTGGATCCCATGGATGAGCCCACCCTGCTTTATCTTCTC
TTCGAAGTTTTCGACGTGGTCAGAGTGCATCAGCCACACCGCGGCATCATCGAGGCAGTCTACCTGCGTA
CACCGTTCTCGGCCGGTAACGCTACCACGTAAGAAGCTTCTTGCTTCTTGCAAATAGCAGCTGCAACCAT
GGCCTGCGGATCCCAAAACGGCTCCAGCGAGCAAGAGCTCAGAGCCATTGTCCAAGACCTGGGTTGCGGA
CCCTATTTTTTGGGAACCTACGATAAGCGCTTCCCGGGGTTCATGGCCCCCGATAAGCTCGCCTGTGCCA
TTGTAAATACGGCCGGACGTGAGACGGGGGGAGAGCACTGGTTGGCTTTCGGTTGGAACCCACGTTCTAA
CACCTGCTACCTTTTTGATCCTTTTGGATTCTCGGATGATCGTCTCAAACAGATTTACCAGTTTGAATAT
GAGGGTCTCCTGCGCCGCAGCGCTCTTGCTACCAAGGACCGCTGTATTACGCTGGAAAAATCTACCCAGA
CCGTGCAGGGCCCCCGTTCTGCCGCCTGCGGACTTTTCTGCTGCATGTTCCTTCACGCCTTTGTGCACTG
GCCTGACCGTCCCATGGACGGAAACCCCACCATGAAATTGCTAACTGGAGTGCCAAACAACATGCTTCAT
TCTCCTAAAGTCCAGCCCACCCTGTGTGACAATCAAAAAGCACTCTACCATTTTCTTAATACCCATTCGC
CTTATTTTCGCTCTCATCGTACACACATCGAAAGGGCCACTGCGTTCGACCGTATGGATGTTCAATAATG
ACTCATGTAAACAACGTGTTCAATAAACATCACTTTATTTTTTTACATGTATCAAGGCTCTGGATTACTT
ATTTATTTACAAGTCGAATGGGTTCTGACGAGAATCAGAATGACCCGCAGGCAGTGATACGTTGCGGAAC
TGATACTTGGGTTGCCACTTGAATTCGGGAATCACCAACTTGGGAACCGGTATATCGGGCAGGATGTCAC
TCCACAGCTTTCTGGTCAGCTGCAAAGCTCCAAGCAGGTCAGGAGCCGAAATCTTGAAATCACAATTAGG
ACCAGTGCTCTGAGCGCGAGAGTTGCGGTACACCGGATTGCAGCACTGAAACACCATCAGCGACGGATGT
CTCACGCTTGCCAGCACGGTGGGATCTGCAATCATGCCCACATCCAGATCTTCAGCATTGGCAATGCTGA
ACGGGGTCATCTTGCAGGTCTGCCTACCCATGGCGGGCACCCAATTAGGCTTGTGGTTGCAATCGCAGTG
CAGGGGGATCAGTATCATCTTGGCCTGATCCTGTCTGATTCCTGGATACACGGCTCTCATGAAAGCATCA
TATTGCTTGAAAGCCTGCTGGGCTTTACTACCCTCGGTATAAAACATCCCGCAGGACCTGCTCGAAAACT
GGTTAGCTGCACAGCCGGCATCATTCACACAGCAGCGGGCGTCATTGTTGGCTATTTGCACCACACTTCT
GCCCCAGCGGTTTTGGGTGATTTTGGTTCGCTCGGGATTCTCCTTTAAGGCTCGTTGTCCGTTCTCGCTG
GCCACATCCATCTCGATAATCTGCTCCTTCTGAATCATAATATTGCCATGCAGGCACTTCAGCTTGCCCT
CATAATCATTGCAGCCATGAGGCCACAACGCACAGCCTGTACATTCCCAATTATGGTGGGCGATCTGAGA
AAAAGAATGTATCATTCCCTGCAGAAATCTTCCCATCATCGTGCTCAGTGTCTTGTGACTAGTGAAAGTT
AACTGGATGCCTCGGTGCTCTTCGTTTACGTACTGGTGACAGATGCGCTTGTATTGTTCGTGTTGCTCAG
GCATTAGTTTAAAACAGGTTCTAAGTTCGTTATCCAGCCTGTACTTCTCCATCAGCAGACACATCACTTC
CATGCCTTTCTCCCAAGCAGACACCAGGGGCAAGCTAATCGGATTCTTAACAGTGCAGGCAGCAGCTCCT
TTAGCCAGAGGGTCATCTTTAGCGATCTTCTCAATGCTTCTTTTGCCATCCTTCTCAACGATGCGCACGG
GCGGGTAGCTGAAACCCACTGCTACAAGTTGCGCCTCTTCTCTTTCTTCTTCGCTGTCTTGACTGATGTC
TTGCATGGGGATATGTTTGGTCTTCCTTGGCTTCTTTTTGGGGGGTATCGGAGGAGGAGGACTGTCGCTC
CGTTCCGGAGACAGGGAGGATTGTGACGTTTCGCTCACCATTACCAACTGACTGTCGGTAGAAGAACCTG
ACCCCACACGGCGACAGGTGTTTTTCTTCGGGGGCAGAGGTGGAGGCGATTGCGAAGGGCTGCGGTCCGA
CCTGGAAGGCGGATGACTGGCAGAACCCCTTCCGCGTTCGGGGGTGTGCTCCCTGTGGCGGTCGCTTAAC
TGATTTCCTTCGCGGCTGGCCATTGTGTTCTCCTAGGCAGAGAAACAACAGACATGGAAACTCAGCCATT
GCTGTCAACATCGCCACGAGTGCCATCACATCTCGTCCTCAGCGACGAGGAAAAGGAGCAGAGCTTAAGC
ATTCCACCGCCCAGTCCTGCCACCACCTCTACCCTAGAAGATAAGGAGGTCGACGCATCTCATGACATGC
AGAATAAAAAAGCGAAAGAGTCTGAGACAGACATCGAGCAAGACCCGGGCTATGTGACACCGGTGGAACA
CGAGGAAGAGTTGAAACGCTTTCTAGAGAGAGAGGATGAAAACTGCCCAAAACAGCGAGCAGATAACTAT
CACCAAGATGCTGGAAATAGGGATCAGAACACCGACTACCTCATAGGGCTTGACGGGGAAGACGCGCTCC
TTAAACATCTAGCAAGACAGTCGCTCATAGTCAAGGATGCATTATTGGACAGAACTGAAGTGCCCATCAG
TGTGGAAGAGCTCAGCTGCGCCTACGAGCTTAACCTTTTTTCACCTCGTACTCCCCCCAAACGTCAGCCA
AACGGCACCTGCGAGCCAAATCCTCGCTTAAACTTTTATCCAGCTTTTGCTGTGCCAGAAGTACTGGCTA
CCTATCACATCTTTTTTAAAAATCAAAAAATTCCAGTCTCCTGCCGCGCTAATCGCACCCGCGCCGATGC
CCTACTCAATCTGGGACCTGGTTCACGCTTACCTGATATAGCTTCCTTGGAAGAGGTTCCAAAGATCTTC
GAGGGTCTGGGCAATAATGAGACTCGGGCCGCAAATGCTCTGCAAAAGGGAGAAAATGGCATGGATGAGC
ATCACAGCGTTCTGGTGGAATTGGAAGGCGATAATGCCAGACTCGCAGTACTCAAGCGAAGCGTCGAGGT
CACACACTTCGCATATCCCGCTGTCAACCTGCCCCCTAAAGTCATGACGGCGGTCATGGACCAGTTACTC
ATTAAGCGCGCAAGTCCCCTTTCAGAAGACATGCATGACCCAGATGCCTGTGATGAGGGTAAACCAGTGG
TCAGTGATGAGCAGCTAACCCGATGGCTGGGCACCGACTCTCCCCGGGATTTGGAAGAGCGTCGCAAGCT
TATGATGGCCGTGGTGCTGGTTACCGTAGAACTAGAGTGTCTCCGACGTTTCTTTACCGATTCAGAAACC
TTGCGCAAACTCGAAGAGAATCTGCACTACACTTTTAGACACGGCTTTGTGCGGCAGGCATGCAAGATAT
CTAACGTGGAACTCACCAACCTGGTTTCCTACATGGGTATTCTGCATGAGAATCGCCTAGGACAAAGCGT
GCTGCACAGCACCCTTAAGGGGGAAGCCCGCCGTGATTACATCCGCGATTGTGTCTATCTCTACCTGTGC
CACACGTGGCAAACCGGCATGGGTGTATGGCAGCAATGTTTAGAAGAACAGAACTTGAAAGAGCTTGACA
AGCTCTTACAGAAATCTCTTAAGGTTCTGTGGACAGGGTTCGACGAGCGCACCGTCGCTTCCGACCTGGC
AGACCTCATCTTCCCAGAGCGTCTCAGGGTTACTTTGCGAAACGGATTGCCTGACTTTATGAGCCAGAGC
ATGCTTAACAATTTTCGCTCTTTCATCCTGGAACGCTCCGGTATCCTGCCCGCCACCTGCTGCGCACTGC
CCTCCGACTTTGTGCCTCTCACCTACCGCGAGTGCCCCCCGCCGCTATGGAGTCACTGCTACCTGTTCCG
TCTGGCCAACTATCTCTCCTACCACTCGGATGTGATCGAGGATGTGAGCGGAGACGGCTTGCTGGAGTGC
CACTGCCGCTGCAATCTGTGCACGCCCCACCGGTCCCTAGCTTGCAACCCCCAGTTGATGAGCGAAACCC
AGATAATAGGCACCTTTGAATTGCAAGGCCCCAGCAGCCAAGGCGATGGGTCTTCTCCTGGGCAAAGTTT
AAAACTGACCCCGGGACTGTGGACCTCCGCCTACTTGCGCAAGTTTGCTCCGGAAGATTACCACCCCTAT
GAAATCAAGTTCTATGAGGACCAATCACAGCCTCCAAAGGCCGAACTTTCGGCTTGCGTCATCACCCAGG
GGGCAATTCTGGCCCAATTGCAAGCCATCCAAAAATCCCGCCAAGAATTTCTACTGAAAAAGGGTAAGGG
GGTCTACCTTGACCCCCAGACCGGCGAGGAACTCAACACAAGGTTCCCTCAGGATGTCCCAACGACGAGA
AAACAAGAAGTTGAAGGTGCAGCCGCCGCCCCCAGAAGATATGGAGGAAGATTGGGACAGTCAGGCAGAG
GAGGCGGAGGAGGACAGTCTGGAGGACAGTCTGGAGGAAGACAGTTTGGAGGAGGAAAACGAGGAGGCAG
AGGAGGTGGAAGAAGTAACCGCCGACAAACAGTTATCCTCGGCTGCGGAGACAAGCAACAGCGCTACCAT
CTCCGCTCCGAGTCGAGGAACCCGGCGGCGTCCCAGCAGTAGATGGGACGAGACCGGACGCTTCCCGAAC
CCAACCAGCGCTTCCAAGACCGGTAAGAAGGATCGGCAGGGATACAAGTCCTGGCGGGGGCATAAGAATG
CCATCATCTCCTGCTTGCATGAGTGCGGGGGCAACATATCCTTCACGCGGCGCTACTTGCTATTCCACCA
TGGGGTGAACTTTCCGCGCAATGTTTTGCATTACTACCGTCACCTCCACAGCCCCTACTATAGCCAGCAA
ATCCCGACAGTCTCGACAGATAAAGACAGCGGCGGCGACCTCCAACAGAAAACCAGCAGCGGCAGTTAGA
AAATACACAACAAGTGCAGCAACAGGAGGATTAAAGATTACAGCCAACGAGCCAGCGCAAACCCGAGAGT
TAAGAAATCGGATCTTTCCAACCCTGTATGCCATCTTCCAGCAGAGTCGGGGTCAAGAGCAGGAACTGAA
AATAAAAAACCGATCTCTGCGTTCGCTCACCAGAAGTTGTTTGTATCACAAGAGCGAAGATCAACTTCAG
CGCACTCTCGAGGACGCCGAGGCTCTCTTCAACAAGTACTGCGCGCTGACTCTTAAAGAGTAGGCAGCGA
CCGCGCTTATTCAAAAAAGGCGGGAATTACATCATCCTCGACATGAGTAAAGAAATTCCCACGCCTTACA
TGTGGAGTTATCAACCCCAAATGGGATTGGCAGCAGGCGCCTCCCAGGACTACTCCACCCGCATGAATTG
GCTCAGCGCCGGGCCTTCTATGATTTCTCGAGTTAATGATATACGCGCCTACCGAAACCAAATACTTTTG
GAACAGTCAGCTCTTACCACCACGCCCCGCCAACACCTTAATCCCAGAAATTGGCCCGCCGCCCTAGTGT
ACCAGGAAAGTCCCGCTCCCACCACTGTATTACTTCCTCGAGACGCCCAGGCCGAAGTCCAAATGACTAA
TGCAGGTGCGCAGTTAGCTGGCGGCTCCACCCTATGTCGTCACAGGCCTCGGCATAATATAAAACGCCTG
ATGATCAGAGGCCGAGGTATCCAGCTCAACGACGAGTCGGTGAGCTCTCCGCTTGGTCTACGACCAGACG
GAATCTTTCAGATTGCCGGCTGCGGGAGATCTTCCTTCACCCCTCGTCAGGCTGTTCTGACTTTGGAAAG
TTCGTCTTCGCAACCCCGCTCGGGCGGAATCGGGACCGTTCAATTTGTAGAGGAGTTTACTCCCTCTGTC
TACTTCAACCCCTTCTCCGGATCTCCTGGGCACTACCCGGACGAGTTCATACCGAACTTCGACGCGATTA
GCGAGTCAGTGGACGGCTACGATTGATGTCTGGTGACGCGGCTGAGCTATCTCGGCTGCGACATCTAGAC
CACTGCCGCCGCTTTCGCTGCTTTGCCCGGGAACTTATTGAGTTCATCTACTTCGAACTCCCCAAGGATC
ACCCTCAAGGTCCGGCCCACGGAGTGCGGATTACTATCGAAGGCAAAATAGACTCTCGCCTGCAACGAAT
TTTCTCCCAGCGGCCCGTGCTGATCGAGCGAGACCAGGGAAACACCACGGTTAGTAATCAATTACGGGGT
CATTAGTTCATAGCCCATATATGGAGTTAACTTGTTTATTGCAGCTTATAATGGTTACAAATAAAGCAAT
AGCATCACAAATTTCACAAATAAAGCATTTTTTTCACTGCATTCTAGTTGTGGTTTGTCCAAACTCATCA
ATGTATCTTATCATGTCTGCTCGAAGCGGCCGGCCGCCCCGACTCTAGAGTCGCGGCCTCATTAGGAAGT
TCCTATACTTTCTAGAGAATAGGAACTTCTCAGAAGAACTCGTCAAGAAGGCGATAGAAGGCGATGCGCT
GCGAATCGGGAGCGGCGATACCGTAAAGCACGAGGAAGCGGTCAGCCCATTCGCCGCCAAGCTCTTCAGC
AATATCACGGGTAGCCAACGCTATGTCCTGATAGCGGTCCGCCACACCCAGCCGGCCACAGTCGATGAAT
CCAGAAAAGCGGCCATTTTCCACCATGATATTCGGCAAGCAGGCATCGCCATGGGTCACGACGAGATCCT
CGCCGTCGGGCATGCGCGCCTTGAGCCTGGCGAACAGTTCGGCTGGCGCGAGCCCCTGATGCTCTTCGTC
CAGATCATCCTGATCGACAAGACCGGCTTCCATCCGAGTACGTGCTCGCTCGATGCGATGTTTCGCTTGG
TGGTCGAATGGGCAGGTAGCCGGATCAAGCGTATGCAGCCGCCGCATTGCATCAGCCATGATGGATACTT
TCTCGGCAGGAGCAAGGTGAGATGACAGGAGATCCTGCCCCGGCACTTCGCCCAATAGCAGCCAGTCCCT
TCCCGCTTCAGTGACAACGTCGAGCACAGCTGCGCAAGGAACGCCCGTCGTGGCCAGCCACGATAGCCGC
GCTGCCTCGTCCTGCAGTTCATTCAGGGCACCGGACAGGTCGGTCTTGACAAAAAGAACCGGGCGCCCCT
GCGCTGACAGCCGGAACACGGCGGCATCAGAGCAGCCGATTGCCTGTTGTGCCCAGTCATAGCCGAATAG
CCTCTCCACCCAAGCGGCCGGAGAACCTGCGTGCAATCCATCTTGTTCAATGGCCGATCCCATAACACCC
CTTGTATTACTGTTTATGTAAGCAGACAGTTTTACTGTTCGTGATGATATATTTTTATCTTGTGCAATGT
AACAGGTTGTGGCCATAGCGGGCCCGGGATTTTCCTCCACGTCCCCGCATGTTAGAAGACTTCCCCTGCC
CTCGGCTCTGGAAGTTCCTATACTTTCTAGAGAATAGGAACTTCCCGCCAGAATGCGTTCGCACAGCCGC
CAGCCGGTCACTCCGTTGATGGTTACTCGGAACAGCAGGGAGCCGTCGGGGTTGATCAGGCGCTCGTCGA
TAATTTTGTTGCCGTTCCACAGGGTCCCTGTTACAGTGATCTTTTTGCCGTCGAACACGGCGATGCCTTC
ATACGGCCGTCCGAAATAGTCGATCATGTTCGGCGTAACCCCGTCGATTACCAGTGTGCCATAGTGCAGG
ATCACCTTAAAGTGATGATCATCCACAGGGTACACCACCTTAAAAATTTTTTCGATCTGGCCCATTTGGT
CGCCGCTCAGACCTTCATACGGGATGATGACATGGATGTCGATCTTCAGCCCATTTTCACCGCTCAGGAC
AATCCTTTGGATCGGAGTTACGGACACCCCGAGATTCTGAAACAAACTGGACACACCTCCCTGTTCAAGG
ACTTGGTCCAGGTTGTAGCCGGCTGTCTGTCGCCAGTCCCCAACGAAATCTTCGAGTGTGAAGACCATGG
ATCCGGGCCCGGGGTTTTCTTCAACGTCTCCAGCCTGCTTCAGCAGGCTGAAGTTAGTAGCTCCGCTTCC
TCGAGCTCGAGATCTGGCGAAGGCGATGGGGGTCTTGAAGGCGTGCTGGTACTCCACGATGCCCAGCTCG
GTGTTGCTGTGCAGCTCCTCCACGCGGCGGAAGGCGAACATGGGGCCCCCGTTCTGCAGGATGCTGGGGT
GGATGGCGCTCTTGAAGTGCATGTGGCTGTCCACCACGAAGCTGTAGTAGCCGCCGTCGCGCAGGCTGAA
GGTGCGGGCGAAGCTGCCCACCAGCACGTTATCGCCCATGGGGTGCAGGTGCTCCACGGTGGCGTTGCTG
CGGATGATCTTGTCGGTGAAGATCACGCTGTCCTCGGGGAAGCCGGTGCCCACCACCTTGAAGTCGCCGA
TCACGCGGCCGGCCTCGTAGCGGTAGCTGAAGCTCACGTGCAGCACGCCGCCGTCCTCGTACTTCTCGAT
GCGGGTGTTGGTGTAGCCGCCGTTGTTGATGGCGTGCAGGAAGGGGTTCTCGTAGCCGCTGGGGTAGGTG
CCGAAGTGGTAGAAGCCGTAGCCCATCACGTGGCTCAGCAGGTAGGGGCTGAAGGTCAGGGCGCCTTTGG
TGCTCTTCATCTTGTTGGTCATGCGGCCCTGCTCGGGGGTGCCCTCTCCGCCGCCCACCAGCTCGAACTC
CACGCCGTTCAGGGTGCCGGTGATGCGGCACTCGATCTTCATGGCGGGCATGGTGGCGACCGGTAGCGCT
AGCGGCTTCGGTACCACGCGTTCGCTCGAATTAATCAATTCTTTGCCAAAATGATGAGACAGCACAATAA
CCAGCACGTTGCCCAGGAGCTGTAGGAAAAAGAAGAAGGCATGAACATGGTTAGCAGAGGCTCTAGAGCC
GCCGGTCACACGCCAGAAGCCGAACCCCGCCCTGCCCCGTCCCCCCCGAAGGCAGCCGTCCCCCCGCGGA
CAGCCCCGAGGCTGGAGAGGGAGAAGGGGACGGCGGCGCGGCGACGCACGAAGGCCCTCCCCGCCCATTT
CCTTCCTGCCGGGGCCCTCCCGGAGCCCCTCAAGGCTTTCACGCAGCCACAGAAAAGAAACAAGCCGTCA
TTAAACCAAGCGCTAATTACAGCCCGGAGGAGAAGGGCCGTCCCGCCCGCTCACCTGTGGGAGTAACGCG
GTCAGTCAGAGCCGGGGCGGGCGGCGCGAGGCGGCGCGGAGCGGGGCACGGGGCGAAGGCAACGCAGCGA
CTCCCGCCCGCCGCGCGCTTCGCTTTTTATAGGGCCGCCGCCGCCGCCGCCTCGCCATAAAAGGAAACTT
TCGGAGCGCGCCGCTCTGATTGGCTGCCGCCGCACCTCTCCGCCTCGCCCCGCCCCGCCCCTCGCCCCGC
CCCGCCCCGCCTGGCGCGCGCCCCCCCCCCCCCCCCGCCCCCATCGCTGCACAAAATAATTAAAAAATAA
ATAAATACAAAATTGGGGGTGGGGAGGGGGGGGAGATGGGGAGAGTGAAGCAGAACGTGGGGCTCACCTC
GACCATGGTAATAGCGATGACTAATACGTAGATGTACTGCCAAGTAGGAAAGTCCCATAAGGTCATGTAC
TGGGCATAATGCCAGGCGGGCCATTTACCGTCATTGACGTCAATAGGGGGCGTACTTGGCATATGATACA
CTTGATGTACTGCCAAGTGGGCAGTTTACCGTAAATACTCCACCCATTGACGTCAATGGAAAGTCCCTAT
TGGCGTTACTATGGGAACATACGTCATTATTGACGTCAATGGGCGGGGGTCGTTGGGCGGTCAGCCAGGC
GGGCCATTTACCGTAAGTTATGTAACGCGGAACAACAACAATTGCATTCATTTTATGTTTCAGGTTCAGG
GGGAGGTGTGGTCCTGCGATTCCATCGAGTGCACCTACACCCTGCTGAAGACCCTATGCGGCCTAAGAGA
CCTGCTACCAATGAATTAAAAAAAAATGATTAATAAAAAATCACTTACTTGAAATCAGCAATAAGGTCTC
TGTTGAAATTTTCTCCCAGCAGCACCTCACTTCCCTCTTCCCAACTCTGGTATTCTAAACCCCGTTCAGC
GGCATACTTTCTCCATACTTTAAAGGGGATGTCAAATTTTAGCTCCTCTCCTGTACCCACAATCTTCATG
TCTTTCTTCCCAGATGACCAAGAGAGTCCGGCTCAGTGACTCCTTCAACCCTGTCTACCCCTATGAAGAT
GAAAGCACCTCCCAACACCCCTTTATAAACCCAGGGTTTATTTCCCCAAATGGCTTCACACAAAGCCCAG
ACGGAGTTCTTACTTTAAAATGTTTAACCCCACTAACAACCACAGGCGGATCTCTACAGCTAAAAGTGGG
AGGGGGACTTACAGTGGATGACACTGATGGTACCTTACAAGAAAACATACGTGCTACAGCACCCATTACT
AAAAATAATCACTCTGTAGAACTATCCATTGGAAATGGATTAGAAACTCAAAACAATAAACTATGTGCCA
AATTGGGAAATGGGTTAAAATTTAACAACGGTGACATTTGTATAAAGGATAGTATTAACACCTTATGGAC
TGGAATAAACCCTCCACCTAACTGTCAAATTGTGGAAAACACTAATACAAATGATGGCAAACTTACTTTA
GTATTAGTAAAAAATGGAGGGCTTGTTAATGGCTACGTGTCTCTAGTTGGTGTATCAGACACTGTGAACC
AAATGTTCACACAAAAGACAGCAAACATCCAATTAAGATTATATTTTGACTCTTCTGGAAATCTATTAAC
TGAGGAATCAGACTTAAAAATTCCACTTAAAAATAAATCTTCTACAGCGACCAGTGAAACTGTAGCCAGC
AGCAAAGCCTTTATGCCAAGTACTACAGCTTATCCCTTCAACACCACTACTAGGGATAGTGAAAACTACA
TTCATGGAATATGTTACTACATGACTAGTTATGATAGAAGTCTATTTCCCTTGAACATTTCTATAATGCT
AAACAGCCGTATGATTTCTTCCAATGTTGCCTATGCCATACAATTTGAATGGAATCTAAATGCAAGTGAA
TCTCCAGAAAGCAACATAGCTACGCTGACCACATCCCCCTTTTTCTTTTCTTACATTACAGAAGACGACA
ACTAAAATAAAGTTTAAGTGTTTTTATTTAAAATCACAAAATTCGAGTAGTTATTTTGCCTCCACCTTCC
CATTTGACAGAATACACAGTCCTTTCTCCCCGGCTGGCCTTAAAAAGCATCATATCATGGGTAACAGACA
TATTCTTAGGTGTTATATTCCACACGGTTTCCTGTCGAGCCAAACGCTCATCAGTGATATTAATAAACTC
CCCGGGCAGCTCACTTAAGTTCATGTCGCTGTCCAGCTGCTGAGCCACAGGCTGCTGTCCAACTTGCGGT
TGCTTAACGGGCGGCGAAGGAGAAGTCCACGCCTACATGGGGGTAGAGTCATAATCGTGCATCAGGATAG
GGCGGTGGTGCTGCAGCAGCGCGCGAATAAACTGCTGCCGCCGCCGCTCCGTCCTGCAGGAATACAACAT
GGCAGTGGTCTCCTCAGCGATGATTCGCACCGCCCGCAGCATAAGGCGCCTTGTCCTCCGGGCACAGCAG
CGCACCCTGATCTCACTTAAATCAGCACAGTAACTGCAGCACAGCACCACAATATTGTTCAAAATCCCAC
AGTGCAAGGCGCTGTATCCAAAGCTCATGGCGGGGACCACAGAACCCACGTGGCCATCATACCACAAGCG
CAGGTAGATTAAGTGGCGACCCCTCATAAACACGCTGGACATAAACATTACCTCTTTTGGCATGTTGTAA
TTCACCACCTCCCGGTACCATATAAACCTCTGATTAAACATGGCGCCATCCACCACCATCCTAAACCAGC
TGGCCAAAACCTGCCCGCCGGCTATACACTGCAGGGAACCGGGACTGGAACAATGACAGTGGAGAGCCCA
GGACTCGTAACCATGGATCATCATGCTCGTCATGATATCAATGTTGGCACAACACAGGCACACGTGCATA
CACTTCCTCAGGATTACAAGCTCCTCCCGCGTTAGAACCATATCCCAGGGAACAACCCATTCCTGAATCA
GCGTAAATCCCACACTGCAGGGAAGACCTCGCACGTAACTCACGTTGTGCATTGTCAAAGTGTTACATTC
GGGCAGCAGCGGATGATCCTCCAGTATGGTAGCGCGGGTTTCTGTCTCAAAAGGAGGTAGACGATCCCTA
CTGTACGGAGTGCGCCGAGACAACCGAGATCGTGTTGGTCGTAGTGTCATGCCAAATGGAACGCCGGACG
TAGTCATTCTCGTATTTTGTATAGCAAAACGCGGCCCTGGCAGAACACACTCTTCTTCGCCTTCTATCCT
GCCGCTTAGCGTGTTCCGTGTGATAGTTCAAGTACAGCCACACTCTTAAGTTGGTCAAAAGAATGCTGGC
TTCAGTTGTAATCAAAACTCCATCGCATCTAATTGTTCTGAGGAAATCATCCACGGTAGCATATGCAAAT
CCCAACCAAGCAATGCAACTGGATTGCGTTTCAAGCAGGAGAGGAGAGGGAAGAGACGGAAGAACCATGT
TAATTTTTATTCCAAACGATCTCGCAGTACTTCAAATTGTAGATCGCGCAGATGGCATCTCTCGCCCCCA
CTGTGTTGGTGAAAAAGCACAGCTAAATCAAAAGAAATGCGATTTTCAAGGTGCTCAACGGTGGCTTCCA
ACAAAGCCTCCACGCGCACATCCAAGAACAAAAGAATACCAAAAGAAGGAGCATTTTCTAACTCCTCAAT
CATCATATTACATTCCTGCACCATTCCCAGATAATTTTCAGCTTTCCAGCCTTGAATTATTCGTGTCAGT
TCTTGTGGTAAATCCAATCCACACATTACAAACAGGTCCCGGAGGGCGCCCTCCACCACCATTCTTAAAC
ACACCCTCATAATGACAAAATATCTTGCTCCTGTGTCACCTGTAGCGAATTGAGAATGGCAACATCAATT
GACATGCCCTTGGCTCTAAGTTCTTCTTTAAGTTCTAGTTGTAAAAACTCTCTCATATTATCACCAAACT
GCTTAGCCAGAAGCCCCCCGGGAACAAGAGCAGGGGACGCTACAGTGCAGTACAAGCGCAGACCTCCCCA
ATTGGCTCCAGCAAAAACAAGATTGGAATAAGCATATTGGGAACCACCAGTAATATCATCGAAGTTGCTG
GAAATATAATCAGGCAGAGTTTCTTGTAGAAATTGAATAAAAGAAAAATTTGCCAAAAAAACATTCAAAA
CCTCTGGGATGCAAATGCAATAGGTTACCGCGCTGCGCTCCAACATTGTTAGTTTTGAATTAGTCTGCAA
AAATAAAAAAAAAACAAGCGTCATATCATAGTAGCCTGACGAACAGGTGGATAAATCAGTCTTTCCATCA
CAAGACAAGCCACAGGGTCTCCAGCTCGACCCTCGTAAAACCTGTCATCGTGATTAAACAACAGCACCGA
AAGTTCCTCGCGGTGACCAGCATGAATAAGTCTTGATGAAGCATACAATCCAGACATGTTAGCATCAGTT
AAGGAGAAAAAACAGCCAACATAGCCTTTGGGTATAATTATGCTTAATCGTAAGTATAGCAAAGCCACCC
CTCGCGGATACAAAGTAAAAGGCACAGGAGAATAAAAAATATAATTATTTCTCTGCTGCTGTTTAGGCAA
CGTCGCCCCCGGTCCCTCTAAATACACATACAAAGCCTCATCAGCCATGGCTTACCAGAGAAAGTACAGC
GGGCACACAAACCACAAGCTCTAAAGTCACTCTCCAACCTCTCCACAATATATATACACAAGCCCTAAAC
TGACGTAATGGGACTAAAGTGTAAAAAATCCCGCCAAACCCAACACACACCCCGAAACTGCGTCACCAGG
GAAAAGTACAGTTTCACTTCCGCAATCCCAACAAGCGTCACTTCCTCTTTCTCACGGTACGTCACATCCC
ATTAACTTACAACGTCATTTTCCCACGGCCGCGCCGCCCCTTTTAACCGTTAACCCCACAGCCAATCACC
ACACGGCCCACACTTTTTAAAATCACCTCATTTACATATTGGCACCATTCCATCTATAAGGTATATTATT
GATGATGGCCAAGCTATTTAGGTGACACTATAGAATACTCAAGCTATGCATCAAGCTTGGTACCGAGCTC
GGATCCACTAGTAACGGCCGCCAGTGTGCTGGAATTCGCCCTTGTTTAAACGCGATCGCTTGAGATCGTT
TTGGTCTGCGCGTAATCTCTTGCTCTGAAAACGAAAAAACCGCCTTGCAGGGCGGTTTTTCGAAGGTTCT
CTGAGCTACCAACTCTTTGAACCGAGGTAACTGGCTTGGAGGAGCGCAGTCACCAAAACTTGTCCTTTCA
GTTTAGCCTTAACCGGCGCATGACTTCAAGACTAACTCCTCTAAATCAATTACCAGTGGCTGCTGCCAGT
GGTGCTTTTGCATGTCTTTCCGGGTTGGACTCAAGACGATAGTTACCGGATAAGGCGCAGCGGTCGGACT
GAACGGGGGGTTCGTGCATACAGTCCAGCTTGGAGCGAACTGCCTACCCGGAACTGAGTGTCAGGCGTGG
AATGAGACAAACGCGGCCATAACAGCGGAATGACACCGGTAAACCGAAAGGCAGGAACAGGAGAGCGCAC
GAGGGAGCCGCCAGGGGGAAACGCCTGGTATCTTTATAGTCCTGTCGGGTTTCGCCACCACTGATTTGAG
CGTCAGATTTCGTGATGCTTGTCAGGGGGGCGGAGCCTATGGAAAAACGGCTTTGCCGCGGCCCTCTCAC
TTCCCTGTTAAGTATCTTCCTGGCATCTTCCAGGAAATCTCCGCCCCGTTCGTAAGCCATTTCCGCTCGC
CGCAGTCGAACGACCGAGCGTAGCGAGTCAGTGAGCGAGGAAGCGGAATATATCCTGTATCACATATTCT
GCTGACGCACCGGTGCAGCCTTTTTTCTCCTGCCACATGAAGCACTTCACTGACACCCTCATCAGTGCCA
ACATAGTAAGCCAGTATACACTCCGCTAGCGCGATCGCTTAATTAATTTAAATCCTGCAGGGTTTAAACG
GCCGGCCTAGGGATAACAGGGTAATCGTAACTATAACGGTCCTAAGGTAGCGAATGATGTCCGGCGGTGC
TTTTGCCGTTACGCACCACCCCGTCAGTAGCTGAACAGGAGGGACAGCTGATAGAAACAGAAGCCACTGG
AGCACCTCAAAAACACCATCATACACTAAATCAGTAAGTTGGCAGCATCACCCGACGCACTTTGCGCCGA
ATAAATACCTGTGACGGAAGATCACTTCGCAGAATAAATAAATCCTGGTGTCCCTGTTGATACCGGGAAG
CCCTGGGCCAACTTTTGGCGAAAATGAGACGTTGTCGGCACGTAAGAGGTTCCAACTTTCACCATAATGA
AATAAGATCACTACCGGGCGTATTTTTTGAGTTATCGAGATTTTCAGGAGCTAAGGAAGCTAAAATGGAG
AAAAAAATCACTGGATATACCACCGTTGATATATCCCAATGGCATCGTAAAGAACATTTTGAGGCATTTC
AGTCAGTTGCTCAATGTACCTATAACCAGACCGTTCAGCTGGATATTACGGCCTTTTTAAAGACCGTAAA
GAAAAATAAGCACAAGTTTTATCCGGCCTTTATTCACATTCTTGCCCGCCTGATGAATGCTCATCCGGAA
TTCCGTATGGCAATGAAAGACGGTGAGCTGGTGATATGGGATAGTGTTCACCCTTGTTACACCGTTTTCC
ATGAGCAAACTGAAACGTTTTCATCGCTCTGGAGTGAATACCACGACGATTTCCGGCAGTTTCTACACAT
ATATTCGCAAGATGTGGCGTGTTACGGTGAAAACCTGGCCTATTTCCCTAAAGGGTTTATTGAGAATATG
TTTTTCGTCTCAGCCAATCCCTGGGTGAGTTTCACCAGTTTTGATTTAAACGTGGCCAATATGGACAACT
TCTTCGCCCCCGTTTTCACCATGGGCAAATATTATACGCAAGGCGACAAGGTGCTGATGCCGCTGGCGAT
TCAGGTTCATCATGCCGTCTGTGATGGCTTCCATGTCGGCAGAATGCTTAATGAATTACAACAGTACTGC
GATGAGTGGCAGGGCGGGGCGTAACCTGCAGGTTAATTAAGGAAGGGCGAATTCTGCAGATATCCATCAC
ACTGGCGGCCGCTCGAGCATGCATCTAGAGGGCCCAATTCGCCCTATAGTGAGTCGTATTACAATTCACT
GGCC (SEQ ID NO: 174)
The nucleotide sequence of PS1:
CATCATCAATAATATACCTTATAGATGGAATGGTGCCAATATGTAAATGAGGTGATTTTAAAAAGTGTGG
GCCGTGTGGTGATTGGCTGTGGGGTTAACGGTTAAAAGGGGCGGCGCGGCCGTGGGAAAATGACGTTTTA
TGGGGGTGGAGTTTTTTTGCAAGTTGTCGCGGGAAATGATAACTTCGTATAGCATACATTATACGAAGTT
ATTTACGCATAAAAAGGCTTCTTTTCTCACGGAACTACTTAGTTTTCCCACGGTATTTAACAGGAAATGA
GGTAGTTTTGACCGGATGCAAGTGAAAATTGCTGATTTTCGCGCGAAAACTGAATGAGGAAGTGTTTTTC
TGAATAATGTGGTATTTATGGCAGGGTGATAACTTCGTATAGCATACATTATACGAAGTTATGGAATGTT
TATGCCTTACCAGTGTAACATGAATCATGTGAAAGTGTTGTTGGAACCAGATGCCTTTTCCAGAATGAGC
CTAACAGGAATCTTTGACATGAACACGCAAATCTGGAAGATCCTGAGGTATGATGATACGAGATCGAGGG
TGCGCGCATGCGAATGCGGAGGCAAGCATGCCAGGTTCCAGCCGGTGTGTGTAGATGTGACCGAAGATCT
CAGACCGGATCATTTGGTTATTGCCCGCACTGGAGCAGAGTTCGGATCCAGTGGAGAAGAAACTGACTAA
GGTGAGTATTGGGAAAACTTTGGGGTGGGATTTTCAGATGGACAGATTGAGTAAAAATTTGTTTTTTCTG
TCTTGCAGCTGACATGAGTGGAAATGCTTCTTTTAAGGGGGGAGTCTTCAGCCCTTATCTGACAGGGCGT
CTCCCATCCTGGGCAGGAGTTCGTCAGAATGTTATGGGATCTACTGTGGATGGAAGACCCGTTCAACCCG
CCAATTCTTCAACGCTGACCTATGCTACTTTAAGTTCTTCACCTTTGGACGCAGCTGCAGCCGCTGCCGC
CGCCTCTGTCGCCGCTAACACTGTGCTTGGAATGGGTTACTATGGAAGCATCGTGGCTAATTCCACTTCC
TCTAATAACCCTTCTACACTGACTCAGGACAAGTTACTTGTCCTTTTGGCCCAGCTGGAGGCTTTGACCC
AACGTCTGGGTGAACTTTCTCAGCAGGTGGCCGAGTTGCGAGTACAAACTGAGTCTGCTGTCGGCACGGC
AAAGTCTAAATAAAAAAAATTCCAGAATCAATGAATAAATAAACGAGCTTGTTGTTGATTTAAAATCAAG
TGTTTTTATTTCATTTTTCGCGCACGGTATGCCCTGGACCACCGATCTCGATCATTGAGAACTCGGTGGA
TTTTTTCCAGAATCCTATAGAGGTGGGATTGAATGTTTAGATACATGGGCATTAGGCCGTCTTTGGGGTG
GAGATAGCTCCATTGAAGGGATTCATGCTCCGGGGTAGTGTTGTAAATCACCCAGTCATAACAAGGTCGC
AGTGCATGGTGTTGCACAATATCTTTTAGAAGTAGGCTGATTGCCACAGATAAGCCCTTGGTGTAGGTGT
TTACAAACCGGTTGAGCTGGGAGGGGTGCATTCGAGGTGAAATTATGTGCATTTTGGATTGGATTTTTAA
GTTGGCAATATTGCCGCCAAGATCCCGTCTTGGGTTCATGTTATGAAGGACTACCAAGACGGTGTATCCG
GTACATTTAGGAAATTTATCGTGCAGCTTGGATGGAAAAGCGTGGAAAAATTTGGAGACACCCTTGTGTC
CTCCGAGATTTTCCATGCACTCATCCATGATAATAGCAATGGGGCCGTGGGCAGCGGCGCGGGCAAACAC
GTTCCGTGGGTCTGACACATCATAGTTATGTTCCTGAGTTAAATCATCATAAGCCATTTTAATGAATTTG
GGGCGGAGCGTACCAGATTGGGGTATGAATGTTCCTTCGGGCCCCGGAGCATAGTTCCCCTCACAGATTT
GCATTTCCCAAGCTTTCAGTTCTGAGGGTGGAATCATGTCCACCTGGGGGGCTATGAAGAACACCGTTTC
GGGGGCGGGGGTGATTAGTTGGGATGATAGCAAGTTTCTGAGCAATTGAGATTTGCCACATCCGGTGGGG
CCATAAATAATTCCGATTACAGGTTGCAGGTGGTAGTTTAGGGAACGGCAACTGCCGTCTTCTCGAAGCA
AGGGGGCCACCTCGTTCATCATTTCCCTTACATGCATATTTTCCCGCACCAAATCCATTAGGAGGCGCTC
TCCTCCTAGTGATAGAAGTTCTTGTAGTGAGGAAAAGTTTTTCAGCGGTTTTAGACCGTCAGCCATGGGC
ATTTTGGAAAGAGTTTGCTGCAAAAGTTCTAGTCTGTTCCACAGTTCAGTGATGTGTTCTATGGCATCTC
GATCCAGCAGACCTCCTCGTTTCGCGGGTTTGGACGGCTCCTGGAGTAGGGTATGAGACGATGGGCGTCC
AGCGCTGCCAGGGTTCGGTCCTTCCAGGGTCTCAGTGTTCGAGTCAGGGTTGTTTCCGTCACAGTGAAGG
GGTGTGCGCCTGCTTGGGCGCTTGCCAGGGTGCGCTTCAGACTCATTCTGCTGGTGGAGAACTTCTGTCG
CTTGGCGCCCTGTATGTCGGCCAAGTAGCAGTTTACCATGAGTTCGTAGTTGAGCGCCTCGGCTGCGTGG
CCTTTGGCGCGGAGCTTACCTTTGGAAGTTTTCTTGCATACCGGGCAGTATAGGCATTTCAGCGCATACA
GCTTGGGCGCAAGGAAAATGGATTCTGGGGAGTATGCATCCGCGCCGCAGGAGGCGCAAACAGTTTCACA
TTCCACCAGCCAGGTTAAATCCGGTTCATTGGGGTCAAAAACAAGTTTTCCGCCATATTTTTTGATGCGT
TTCTTACCTTTGGTCTCCATAAGTTCGTGTCCTCGTTGAGTGACAAACAGGCTGTCCGTATCTCCGTAGA
CTGATTTTACAGGCCTCTTCTCCAGTGGAGTGCCTCGGTCTTCTTCGTACAGGAACTCTGACCACTCTGA
TACAAAGGCGCGCGTCCAGGCCAGCACAAAGGAGGCTATGTGGGAGGGGTAGCGATCGTTGTCAACCAGG
GGGTCCACCTTTTCCAAAGTATGCAAACACATGTCACCCTCTTCAACATCCAGGAATGTGATTGGCTTGT
AGGTGTATTTCACGTGACCTGGGGTCCCCGCTGGGGGGGTATAAAAGGGGGCGGTTCTTTGCTCTTCCTC
ACTGTCTTCCGGATCGCTGTCCAGGAACGTCAGCTGTTGGGGTAGGTATTCCCTCTCGAAGGCGGGCATG
ACCTCTGCACTCAGGTTGTCAGTTTCTAAGAACGAGGAGGATTTGATATTGACAGTGCCGGTTGAGATGC
CTTTCATGAGGTTTTCGTCCATTTGGTCAGAAAACACAATTTTTTTATTGTCAAGTTTGGTGGCAAATGA
TCCATACAGGGCGTTGGATAAAAGTTTGGCAATGGATCGCATGGTTTGGTTCTTTTCCTTGTCCGCGCGC
TCTTTGGCGGCGATGTTGAGTTGGACATACTCGCGTGCCAGGCACTTCCATTCGGGGAAGATAGTTGTTA
ATTCATCTGGCACGATTCTCACTTGCCACCCTCGATTATGCAAGGTAATTAAATCCACACTGGTGGCCAC
CTCGCCTCGAAGGGGTTCATTGGTCCAACAGAGCCTACCTCCTTTCCTAGAACAGAAAGGGGGAAGTGGG
TCTAGCATAAGTTCATCGGGAGGGTCTGCATCCATGGTAAAGATTCCCGGAAGTAAATCCTTATCAAAAT
AGCTGATGGGAGTGGGGTCATCTAAGGCCATTTGCCATTCTCGAGCTGCCAGTGCGCGCTCATATGGGTT
AAGGGGACTGCCCCAGGGCATGGGATGGGTGAGAGCAGAGGCATACATGCCACAGATGTCATAGACGTAG
ATGGGATCCTCAAAGATGCCTATGTAGGTTGGATAGCATCGCCCCCCTCTGATACTTGCTCGCACATAGT
CATATAGTTCATGTGATGGCGCTAGCAGCCCCGGACCCAAGTTGGTGCGATTGGGTTTTTCTGTTCTGTA
GACGATCTGGCGAAAGATGGCGTGAGAATTGGAAGAGATGGTGGGTCTTTGAAAAATGTTGAAATGGGCA
TGAGGTAGACCTACAGAGTCTCTGACAAAGTGGGCATAAGATTCTTGAAGCTTGGTTACCAGTTCGGCGG
TGACAAGTACGTCTAGGGCGCAGTAGTCAAGTGTTTCTTGAATGATGTCATAACCTGGTTGGTTTTTCTT
TTCCCACAGTTCGCGGTTGAGAAGGTATTCTTCGCGATCCTTCCAGTACTCTTCTAGCGGAAACCCGTCT
TTGTCTGCACGGTAAGATCCTAGCATGTAGAACTGATTAACTGCCTTGTAAGGGCAGCAGCCCTTCTCTA
CGGGTAGAGAGTATGCTTGAGCAGCTTTTCGTAGCGAAGCGTGAGTAAGGGCAAAGGTGTCTCTGACCAT
GACTTTGAGAAATTGGTATTTGAAGTCCATGTCGTCACAGGCTCCCTGTTCCCAGAGTTGGAAGTCTACC
CGTTTCTTGTAGGCGGGGTTGGGCAAAGCGAAAGTAACATCATTGAAGAGAATCTTACCGGCTCTGGGCA
TAAAATTGCGAGTGATGCGGAAAGGCTGTGGTACTTCCGCTCGATTGTTGATCACCTGGGCAGCTAGGAC
GATTTCGTCGAAACCGTTGATGTTGTGTCCTACGATGTATAATTCTATGAAACGCGGCGTGCCTCTGACG
TGAGGTAGCTTACTGAGCTCATCAAAGGTTAGGTCTGTGGGGTCAGATAAGGCGTAGTGTTCGAGAGCCC
ATTCGTGCAGGTGAGGATTTGCATGTAGGAATGATGACCAAAGATCTACCGCCAGTGCTGTTTGTAACTG
GTCCCGATACTGACGAAAATGCCGGCCAATTGCCATTTTTTCTGGAGTGACACAGTAGAAGGTTCTGGGG
TCTTGTTGCCATCGATCCCACTTGAGTTTAATGGCTAGATCGTGGGCCATGTTGACGAGACGCTCTTCTC
CTGAGAGTTTCATGACCAGCATGAAAGGAACTAGTTGTTTGCCAAAGGATCCCATCCAGGTGTAAGTTTC
CACATCGTAGGTCAGGAAGAGTCTTTCTGTGCGAGGATGAGAGCCGATCGGGAAGAACTGGATTTCCTGC
CACCAGTTGGAGGATTGGCTGTTGATGTGATGGAAGTAGAAGTTTCTGCGGCGCGCCGAGCATTCGTGTT
TGTGCTTGTACAGACGGCCGCAGTAGTCGCAGCGTTGCACGGGTTGTATCTCGTGAATGAGCTGTACCTG
GCTTCCCTTGACGAGAAATTTCAGTGGGAAGCCGAGGCCTGGCGATTGTATCTCGTGCTCTTCTATATTC
GCTGTATCGGCCTGTTCATCTTCTGTTTCGATGGTGGTCATGCTGACGAGCCCCCGCGGGAGGCAAGTCC
AGACCTCGGCGCGGGAGGGGCGGAGCTGAAGGACGAGAGCGCGCAGGCTGGAGCTGTCCAGAGTCCTGAG
ACGCTGCGGACTCAGGTTAGTAGGTAGGGACAGAAGATTAACTTGCATGATCTTTTCCAGGGCGTGCGGG
AGGTTCAGATGGTACTTGATTTCCACAGGTTCGTTTGTAGAGACGTCAATGGCTTGCAGGGTTCCGTGTC
CTTTGGGCGCCACTACCGTACCTTTGTTTTTTCTTTTGATCGGTGGTGGCTCTCTTGCTTCTTGCATGCT
CAGAAGCGGTGACGGGGACGCGCGCCGGGCGGCAGCGGTTGTTCCGGACCCGGGGGCATGGCTGGTAGTG
GCACGTCGGCGCCGCGCACGGGCAGGTTCTGGTATTGCGCTCTGAGAAGACTTGCGTGCGCCACCACGCG
TCGATTGACGTCTTGTATCTGACGTCTCTGGGTGAAAGCTACCGGCCCCGTGAGCTTGAACCTGAAAGAG
AGTTCAACAGAATCAATTTCGGTATCGTTAACGGCAGCTTGTCTCAGTATTTCTTGTACGTCACCAGAGT
TGTCCTGGTAGGCGATCTCCGCCATGAACTGCTCGATTTCTTCCTCCTGAAGATCTCCGCGACCCGCTCT
TTCGACGGTGGCCGCGAGGTCATTGGAGATACGGCCCATGAGTTGGGAGAATGCATTCATGCCCGCCTCG
TTCCAGACGCGGCTGTAAACCACGGCCCCCTCGGAGTCTCTTGCGCGCATCACCACCTGAGCGAGGTTAA
GCTCCACGTGTCTGGTGAAGACCGCATAGTTGCATAGGCGCTGAAAAAGGTAGTTGAGTGTGGTGGCAAT
GTGTTCGGCGACGAAGAAATACATGATCCATCGTCTCAGCGGCATTTCGCTAACATCGCCCAGAGCTTCC
AAGCGCTCCATGGCCTCGTAGAAGTCCACGGCAAAATTAAAAAACTGGGAGTTTCGCGCGGACACGGTCA
ATTCCTCCTCGAGAAGACGGATGAGTTCGGCTATGGTGGCCCGTACTTCGCGTTCGAAGGCTCCCGGGAT
CTCTTCTTCCTCTTCTATCTCTTCTTCCACTAACATCTCTTCTTCGTCTTCAGGCGGGGGCGGAGGGGGC
ACGCGGCGACGTCGACGGCGCACGGGCAAACGGTCGATGAATCGTTCAATGACCTCTCCGCGGCGGCGGC
GCATGGTTTCAGTGACGGCGCGGCCGTTCTCGCGCGGTCGCAGAGTAAAAACACCGCCGCGCATCTCCTT
AAAGTGGTGACTGGGAGGTTCTCCGTTTGGGAGGGAGAGGGCGCTGATTATACATTTTATTAATTGGCCC
GTAGGGACTGCGCGCAGAGATCTGATCGTGTCAAGATCCACGGGATCTGAAAACCTTTCGACGAAAGCGT
CTAACCAGTCACAGTCACAAGGTAGGCTGAGTACGGCTTCTTGTGGGCGGGGGTGGTTATGTGTTCGGTC
TGGGTCTTCTGTTTCTTCTTCATCTCGGGAAGGTGAGACGATGCTGCTGGTGATGAAATTAAAGTAGGCA
GTTCTAAGACGGCGGATGGTGGCGAGGAGCACCAGGTCTTTGGGTCCGGCTTGCTGGATACGCAGGCGAT
TGGCCATTCCCCAAGCATTATCCTGACATCTAGCAAGATCTTTGTAGTAGTCTTGCATGAGCCGTTCTAC
GGGCACTTCTTCCTCACCCGTTCTGCCATGCATACGTGTGAGTCCAAATCCGCGCATTGGTTGTACCAGT
GCCAAGTCAGCTACGACTCTTTCGGCGAGGATGGCTTGCTGTACTTGGGTAAGGGTGGCTTGAAAGTCAT
CAAAATCCACAAAGCGGTGGTAAGCCCCTGTATTAATGGTGTAAGCACAGTTGGCCATGACTGACCAGTT
AACTGTCTGGTGACCAGGGCGCACGAGCTCGGTGTATTTAAGGCGCGAATAGGCGCGGGTGTCAAAGATG
TAATCGTTGCAGGTGCGCACCAGATACTGGTACCCTATAAGAAAATGCGGCGGTGGTTGGCGGTAGAGAG
GCCATCGTTCTGTAGCTGGAGCGCCAGGGGCGAGGTCTTCCAACATAAGGCGGTGATAGCCGTAGATGTA
CCTGGACATCCAGGTGATTCCTGCGGCGGTAGTAGAAGCCCGAGGAAACTCGCGTACGCGGTTCCAAATG
TTGCGTAGCGGCATGAAGTAGTTCATTGTAGGCACGGTTTGACCAGTGAGGCGCGCGCAGTCATTGATGC
TCTATAGACACGGAGAAAATGAAAGCGTTCAGCGACTCGACTCCGTAGCCTGGAGGAACGTGAACGGGTT
GGGTCGCGGTGTACCCCGGTTCGAGACTTGTACTCGAGCCGGCCGGAGCCGCGGCTAACGTGGTATTGGC
ACTCCCGTCTCGACCCAGCCTACAAAAATCCAGGATACGGAATCGAGTCGTTTTGCTGGTTTCCGAATGG
CAGGGAAGTGAGTCCTATTTTTTTTTTTTTTGCCGCTCAGATGCATCCCGTGCTGCGACAGATGCGCCCC
CAACAACAGCCCCCCTCGCAGCAGCAGCAGCAGCAACCACAAAAGGCTGTCCCTGCAACTACTGCAACTG
CCGCCGTGAGCGGTGCGGGACAGCCCGCCTATGATCTGGACTTGGAAGAGGGCGAAGGACTGGCACGTCT
AGGTGCGCCTTCGCCCGAGCGGCATCCGCGAGTTCAACTGAAAAAAGATTCTCGCGAGGCGTATGTGCCC
CAACAGAACCTATTTAGAGACAGAAGCGGCGAGGAGCCGGAGGAGATGCGAGCTTCCCGCTTTAACGCGG
GTCGTGAGCTGCGTCACGGTTTGGACCGAAGACGAGTGTTGCGAGACGAGGATTTCGAAGTTGATGAAGT
GACAGGGATCAGTCCTGCCAGGGCACACGTGGCTGCAGCCAACCTTGTATCGGCTTACGAGCAGACAGTA
AAGGAAGAGCGTAACTTCCAAAAGTCTTTTAATAATCATGTGCGAACCCTGATTGCCCGCGAAGAAGTTA
CCCTTGGTTTGATGCATTTGTGGGATTTGATGGAAGCTATCATTCAGAACCCTACTAGCAAACCTCTGAC
CGCCCAGCTGTTTCTGGTGGTGCAACACAGCAGAGACAATGAGGCTTTCAGAGAGGCGCTGCTGAACATC
ACCGAACCCGAGGGGAGATGGTTGTATGATCTTATCAACATTCTACAGAGTATCATAGTGCAGGAGCGGA
GCCTGGGCCTGGCCGAGAAGGTAGCTGCCATCAATTACTCGGTTTTGAGCTTGGGAAAATATTACGCTCG
CAAAATCTACAAGACTCCATACGTTCCCATAGACAAGGAGGTGAAGATAGATGGGTTCTACATGCGCATG
ACGCTCAAGGTCTTGACCCTGAGCGATGATCTTGGGGTGTATCGCAATGACAGAATGCATCGCGCGGTTA
GCGCCAGCAGGAGGCGCGAGTTAAGCGACAGGGAACTGATGCACAGTTTGCAAAGAGCTCTGACTGGAGC
TGGAACCGAGGGTGAGAATTACTTCGACATGGGAGCTGACTTGCAGTGGCAGCCTAGTCGCAGGGCTCTG
AGCGCCGCGACGGCAGGATGTGAGCTTCCTTACATAGAAGAGGCGGATGAAGGCGAGGAGGAAGAGGGCG
AGTACTTGGAAGACTGATGGCACAACCCGTGTTTTTTGCTAGATGGAACAGCAAGCACCGGATCCCGCAA
TGCGGGCGGCGCTGCAGAGCCAGCCGTCCGGCATTAACTCCTCGGACGATTGGACCCAGGCCATGCAACG
TATCATGGCGTTGACGACTCGCAACCCCGAAGCCTTTAGACAGCAACCCCAGGCCAACCGTCTATCGGCC
ATCATGGAAGCTGTAGTGCCTTCCCGATCTAATCCCACTCATGAGAAGGTCCTGGCCATCGTGAACGCGT
TGGTGGAGAACAAAGCTATTCGTCCAGATGAGGCCGGACTGGTATACAACGCTCTCTTAGAACGCGTGGC
TCGCTACAACAGTAGCAATGTGCAAACCAATTTGGACCGTATGATAACAGATGTACGCGAAGCCGTGTCT
CAGCGCGAAAGGTTCCAGCGTGATGCCAACCTGGGTTCGCTGGTGGCGTTAAATGCTTTCTTGAGTACTC
AGCCTGCTAATGTGCCGCGTGGTCAACAGGATTATACTAACTTTTTAAGTGCTTTGAGACTGATGGTATC
AGAAGTACCTCAGAGCGAAGTGTATCAGTCCGGTCCTGATTACTTCTTTCAGACTAGCAGACAGGGCTTG
CAGACGGTAAATCTGAGCCAAGCTTTTAAAAACCTTAAAGGTTTGTGGGGAGTGCATGCCCCGGTAGGAG
AAAGAGCAACCGTGTCTAGCTTGTTAACTCCGAACTCCCGCCTGTTATTACTGTTGGTAGCTCCTTTCAC
CGACAGCGGTAGCATCGACCGTAATTCCTATTTGGGTTACCTACTAAACCTGTATCGCGAAGCCATAGGG
CAAAGTCAGGTGGACGAGCAGACCTATCAAGAAATTACCCAAGTCAGTCGCGCTTTGGGACAGGAAGACA
CTGGCAGTTTGGAAGCCACTCTGAACTTCTTGCTTACCAATCGGTCTCAAAAGATCCCTCCTCAATATGC
TCTTACTGCGGAGGAGGAGAGGATCCTTAGATATGTGCAGCAGAGCGTGGGATTGTTTCTGATGCAAGAG
GGGGCAACTCCGACTGCAGCACTGGACATGACAGCGCGAAATATGGAGCCCAGCATGTATGCCAGTAACC
GACCTTTCATTAACAAACTGCTGGACTACTTGCACAGAGCTGCCGCTATGAACTCTGATTATTTCACCAA
TGCCATCTTAAACCCGCACTGGCTGCCCCCACCTGGTTTCTACACGGGCGAATATGACATGCCCGACCCT
AATGACGGATTTCTGTGGGACGACGTGGACAGCGATGTTTTTTCACCTCTTTCTGATCATCGCACGTGGA
AAAAGGAAGGCGGTGATAGAATGCATTCTTCTGCATCGCTGTCCGGGGTCATGGGTGCTACCGCGGCTGA
GCCCGAGTCTGCAAGTCCTTTTCCTAGTCTACCCTTTTCTCTACACAGTGTACGTAGCAGCGAAGTGGGT
AGAATAAGTCGCCCGAGTTTAATGGGCGAAGAGGAGTACCTAAACGATTCCTTGCTCAGACCGGCAAGAG
AAAAAAATTTCCCAAACAATGGAATAGAAAGTTTGGTGGATAAAATGAGTAGATGGAAGACTTATGCTCA
GGATCACAGAGACGAGCCTGGGATCATGGGGACTACAAGTAGAGCGAGCCGTAGACGCCAGCGCCATGAC
AGACAGAGGGGTCTTGTGTGGGACGATGAGGATTCGGCCGATGATAGCAGCGTGTTGGACTTGGGTGGGA
GAGGAAGGGGCAACCCGTTTGCTCATTTGCGCCCTCGCTTGGGTGGTATGTTGTGAAAAAAAATAAAAAA
GAAAAACTCACCAAGGCCATGGCGACGAGCGTACGTTCGTTCTTCTTTATTATCTGTGTCTAGTATAATG
AGGCGAGTCGTGCTAGGCGGAGCGGTGGTGTATCCGGAGGGTCCTCCTCCTTCGTACGAGAGCGTGATGC
AGCAGCAGCAGGCGACGGCGGTGATGCAATCCCCACTGGAGGCTCCCTTTGTGCCTCCGCGATACCTGGC
ACCTACGGAGGGCAGAAACAGCATTCGTTACTCGGAACTGGCACCTCAGTACGATACCACCAGGTTGTAT
CTGGTGGACAACAAGTCGGCGGACATTGCTTCTCTGAACTATCAGAATGACCACAGCAACTTCTTGACCA
CGGTGGTGCAGAACAATGACTTTACCCCTACGGAAGCCAGCACCCAGACCATTAACTTTGATGAACGATC
GCGGTGGGGCGGTCAGCTAAAGACCATCATGCATACTAACATGCCAAACGTGAACGAGTATATGTTTAGT
AACAAGTTCAAAGCGCGTGTGATGGTGTCCAGAAAACCTCCCGACGGTGCTGCAGTTGGGGATACTTATG
ATCACAAGCAGGATATTTTGGAATATGAGTGGTTCGAGTTTACTTTGCCAGAAGGCAACTTTTCAGTTAC
TATGACTATTGATTTGATGAACAATGCCATCATAGATAATTACTTGAAAGTGGGTAGACAGAATGGAGTG
CTTGAAAGTGACATTGGTGTTAAGTTCGACACCAGGAACTTCAAGCTGGGATGGGATCCCGAAACCAAGT
TGATCATGCCTGGAGTGTATACGTATGAAGCCTTCCATCCTGACATTGTCTTACTGCCTGGCTGCGGAGT
GGATTTTACCGAGAGTCGTTTGAGCAACCTTCTTGGTATCAGAAAAAAACAGCCATTTCAAGAGGGTTTT
AAGATTTTGTATGAAGATTTAGAAGGTGGTAATATTCCGGCCCTCTTGGATGTAGATGCCTATGAGAACA
GTAAGAAAGAACAAAAAGCCAAAATAGAAGCTGCTACAGCTGCTGCAGAAGCTAAGGCAAACATAGTTGC
CAGCGACTCTACAAGGGTTGCTAACGCTGGAGAGGTCAGAGGAGACAATTTTGCGCCAACACCTGTTCCG
ACTGCAGAATCATTATTGGCCGATGTGTCTGAAGGAACGGACGTGAAACTCACTATTCAACCTGTAGAAA
AAGATAGTAAGAATAGAAGCTATAATGTGTTGGAAGACAAAATCAACACAGCCTATCGCAGTTGGTATCT
TTCGTACAATTATGGCGATCCCGAAAAAGGAGTGCGTTCCTGGACATTGCTCACCACCTCAGATGTCACC
TGCGGAGCAGAGCAGGTTTACTGGTCGCTTCCAGACATGATGAAGGATCCTGTCACTTTCCGCTCCACTA
GACAAGTCAGTAACTACCCTGTGGTGGGTGCAGAGCTTATGCCCGTCTTCTCAAAGAGCTTCTACAACGA
ACAAGCTGTGTACTCCCAGCAGCTCCGCCAGTCCACCTCGCTTACGCACGTCTTCAACCGCTTTCCTGAG
AACCAGATTTTAATCCGTCCGCCGGCGCCCACCATTACCACCGTCAGTGAAAACGTTCCTGCTCTCACAG
ATCACGGGACCCTGCCGTTGCGCAGCAGTATCCGGGGAGTCCAACGTGTGACCGTTACTGACGCCAGACG
CCGCACCTGTCCCTACGTGTACAAGGCACTGGGCATAGTCGCACCGCGCGTCCTTTCAAGCCGCACTTTC
TAAAAAAAAAATGTCCATTCTTATCTCGCCCAGTAATAACACCGGTTGGGGTCTGCGCGCTCCAAGCAAG
ATGTACGGAGGCGCACGCAAACGTTCTACCCAACATCCCGTGCGTGTTCGCGGACATTTTCGCGCTCCAT
GGGGTGCCCTCAAGGGCCGCACTCGCGTTCGAACCACCGTCGATGATGTAATCGATCAGGTGGTTGCCGA
CGCCCGTAATTATACTCCTACTGCGCCTACATCTACTGTGGATGCAGTTATTGACAGTGTAGTGGCTGAC
GCTCGCAACTATGCTCGACGTAAGAGCCGGCGAAGGCGCATTGCCAGACGCCACCGAGCTACCACTGCCA
TGCGAGCCGCAAGAGCTCTGCTACGAAGAGCTAGACGCGTGGGGCGAAGAGCCATGCTTAGGGCGGCCAG
ACGTGCAGCTTCGGGCGCCAGCGCCGGCAGGTCCCGCAGGCAAGCAGCCGCTGTCGCAGCGGCGACTATT
GCCGACATGGCCCAATCGCGAAGAGGCAATGTATACTGGGTGCGTGACGCTGCCACCGGTCAACGTGTAC
CCGTGCGCACCCGTCCCCCTCGCACTTAGAAGATACTGAGCAGTCTCCGATGTTGTGTCCCAGCGGCGAG
GATGTCCAAGCGCAAATACAAGGAAGAAATGCTGCAGGTTATCGCACCTGAAGTCTACGGCCAACCGTTG
AAGGATGAAAAAAAACCCCGCAAAATCAAGCGGGTTAAAAAGGACAAAAAAGAAGAGGAAGATGGCGATG
ATGGGCTGGCGGAGTTTGTGCGCGAGTTTGCCCCACGGCGACGCGTGCAATGGCGTGGGCGCAAAGTTCG
ACATGTGTTGAGACCTGGAACTTCGGTGGTCTTTACACCCGGCGAGCGTTCAAGCGCTACTTTTAAGCGT
TCCTATGATGAGGTGTACGGGGATGATGATATTCTTGAGCAGGCGGCTGACCGATTAGGCGAGTTTGCTT
ATGGCAAGCGTAGTAGAATAACTTCCAAGGATGAGACAGTGTCAATACCCTTGGATCATGGAAATCCCAC
CCCTAGTCTTAAACCGGTCACTTTGCAGCAAGTGTTACCCGTAACTCCGCGAACAGGTGTTAAACGCGAA
GGTGAAGATTTGTATCCCACTATGCAACTGATGGTACCCAAACGCCAGAAGTTGGAGGACGTTTTGGAGA
AAGTAAAAGTGGATCCAGATATTCAACCTGAGGTTAAAGTGAGACCCATTAAGCAGGTAGCGCCTGGTCT
GGGGGTACAAACTGTAGACATTAAGATTCCCACTGAAAGTATGGAAGTGCAAACTGAACCCGCAAAGCCT
ACTGCCACCTCCACTGAAGTGCAAACGGATCCATGGATGCCCATGCCTATTACAACTGACGCCGCCGGTC
CCACTCGAAGATCCCGACGAAAGTACGGTCCAGCAAGTCTGTTGATGCCCAATTATGTTGTACACCCATC
TATTATTCCTACTCCTGGTTACCGAGGCACTCGCTACTATCGCAGCCGAAACAGTACCTCCCGCCGTCGC
CGCAAGACACCTGCAAATCGCAGTCGTCGCCGTAGACGCACAAGCAAACCGACTCCCGGCGCCCTGGTGC
GGCAAGTGTACCGCAATGGTAGTGCGGAACCTTTGACACTGCCGCGTGCGCGTTACCATCCGAGTATCAT
CACTTAATCAATGTTGCCGCTGCCTCCTTGCAGATATGGCCCTCACTTGTCGCCTTCGCGTTCCCATCAC
TGGTTACCGAGGAAGAAACTCGCGCCGTAGAAGAGGGATGTTGGGACGCGGAATGCGACGCTACAGGCGA
CGGCGTGCTATCCGCAAGCAATTGCGGGGTGGTTTTTTACCAGCCTTAATTCCAATTATCGCTGCTGCAA
TTGGCGCGATACCAGGCATAGCTTCCGTGGCGGTTCAGGCCTCGCAACGACATTGACATTGGAAAAAAAA
CGTATAAATAAAAAAAAATACAATGGACTCTGACACTCCTGGTCCTGTGACTATGTTTTCTTAGAGATGG
AAGACATCAATTTTTCATCCTTGGCTCCGCGACACGGCACGAAGCCGTACATGGGCACCTGGAGCGACAT
CGGCACGAGCCAACTGAACGGGGGCGCCTTCAATTGGAGCAGTATCTGGAGCGGGCTTAAAAATTTTGGC
TCAACCATAAAAACATACGGGAACAAAGCTTGGAACAGCAGTACAGGACAGGCGCTTAGAAATAAACTTA
AAGACCAGAACTTCCAACAAAAAGTAGTCGATGGGATAGCTTCCGGCATCAATGGAGTGGTAGATTTGGC
TAACCAGGCTGTGCAGAAAAAGATAAACAGTCGTTTGGACCCGCCGCCAGCAACCCCAGGTGAAATGCAA
GTGGAGGAAGAAATTCCTCCGCCAGAAAAACGAGGCGACAAGCGTCCGCGTCCCGATTTGGAAGAGACGC
TGGTGACGCGCGTAGATGAACCGCCTTCTTATGAGGAAGCAACGAAGCTTGGAATGCCCACCACTAGACC
GATAGCCCCAATGGCCACCGGGGTGATGAAACCTTCTCAGTTGCATCGACCCGTCACCTTGGATTTGCCC
CCTCCCCCTGCTGCTACTGCTGTACCCGCTTCTAAGCCTGTCGCTGCCCCGAAACCAGTCGCCGTAGCCA
GGTCACGTCCCGGGGGCGCTCCTCGTCCAAATGCGCACTGGCAAAATACTCTGAACAGCATCGTGGGTCT
AGGCGTGCAAAGTGTAAAACGCCGTCGCTGCTTTTAATTAAATATGGAGTAGCGCTTAACTTGCCTATCT
GTGTATATGTGTCATTACACGCCGTCACAGCAGCAGAGGAAAAAAGGAAGAGGTCGTGCGTCGACGCTGA
GTTACTTTCAAGATGGCCACCCCATCGATGCTGCCCCAATGGGCATACATGCACATCGCCGGACAGGATG
CTTCGGAGTACCTGAGTCCGGGTCTGGTGCAGTTCGCCCGCGCCACAGACACCTACTTCAATCTGGGAAA
TAAGTTTAGAAATCCCACCGTAGCGCCGACCCACGATGTGACCACCGACCGTAGCCAGCGGCTCATGTTG
CGCTTCGTGCCCGTTGACCGGGAGGACAATACATACTCTTACAAAGTGCGGTACACCCTGGCCGTGGGCG
ACAACAGAGTGCTGGATATGGCCAGCACGTTCTTTGACATTAGGGGCGTGTTGGACAGAGGTCCCAGTTT
CAAACCCTATTCTGGTACGGCTTACAACTCTCTGGCTCCTAAAGGCGCTCCAAATGCATCTCAATGGATT
GCAAAAGGCGTACCAACTGCAGCAGCCGCAGGCAATGGTGAAGAAGAACATGAAACAGAGGAGAAAACTG
CTACTTACACTTTTGCCAATGCTCCTGTAAAAGCCGAGGCTCAAATTACAAAAGAGGGCTTACCAATAGG
TTTGGAGATTTCAGCTGAAAACGAATCTAAACCCATCTATGCAGATAAACTTTATCAGCCAGAACCTCAA
GTGGGAGATGAAACTTGGACTGACCTAGACGGAAAAACCGAAGAGTATGGAGGCAGGGCTCTAAAGCCTA
CTACTAACATGAAACCCTGTTACGGGTCCTATGCGAAGCCTACTAATTTAAAAGGTGGTCAGGCAAAACC
GAAAAACTCGGAACCGTCGAGTGAAAAAATTGAATATGATATTGACATGGAATTTTTTGATAACTCATCG
CAAAGAACAAACTTCAGTCCTAAAATTGTCATGTATGCAGAAAATGTAGGTTTGGAAACGCCAGACACTC
ATGTAGTGTACAAACCTGGAACAGAAGACACAAGTTCCGAAGCTAATTTGGGACAACAGTCTATGCCCAA
CAGACCCAACTACATTGGCTTCAGAGATAACTTTATTGGACTCATGTACTATAACAGTACTGGTAACATG
GGGGTGCTGGCTGGTCAAGCGTCTCAGTTAAATGCAGTGGTTGACTTGCAGGACAGAAACACAGAACTTT
CTTACCAACTCTTGCTTGACTCTCTGGGCGACAGAACCAGATACTTTAGCATGTGGAATCAGGCTGTGGA
CAGTTATGATCCTGATGTACGTGTTATTGAAAATCATGGTGTGGAAGATGAACTTCCCAACTATTGTTTT
CCACTGGACGGCATAGGTGTTCCAACAACCAGTTACAAATCAATAGTTCCAAATGGAGAAGATAATAATA
ATTGGAAAGAACCTGAAGTAAATGGAACAAGTGAGATCGGACAGGGTAATTTGTTTGCCATGGAAATTAA
CCTTCAAGCCAATCTATGGCGAAGTTTCCTTTATTCCAATGTGGCTCTGTATCTCCCAGACTCGTACAAA
TACACCCCGTCCAATGTCACTCTTCCAGAAAACAAAAACACCTACGACTACATGAACGGGCGGGTGGTGC
CGCCATCTCTAGTAGACACCTATGTGAACATTGGTGCCAGGTGGTCTCTGGATGCCATGGACAATGTCAA
CCCATTCAACCACCACCGTAACGCTGGCTTGCGTTACCGATCTATGCTTCTGGGTAACGGACGTTATGTG
CCTTTCCACATACAAGTGCCTCAAAAATTCTTCGCTGTTAAAAACCTGCTGCTTCTCCCAGGCTCCTACA
CTTATGAGTGGAACTTTAGGAAGGATGTGAACATGGTTCTACAGAGTTCCCTCGGTAACGACCTGCGGGT
AGATGGCGCCAGCATCAGTTTCACGAGCATCAACCTCTATGCTACTTTTTTCCCCATGGCTCACAACACC
GCTTCCACCCTTGAAGCCATGCTGCGGAATGACACCAATGATCAGTCATTCAACGACTACCTATCTGCAG
CTAACATGCTCTACCCCATTCCTGCCAATGCAACCAATATTCCCATTTCCATTCCTTCTCGCAACTGGGC
GGCTTTCAGAGGCTGGTCATTTACCAGACTGAAAACCAAAGAAACTCCCTCTTTGGGGTCTGGATTTGAC
CCCTACTTTGTCTATTCTGGTTCTATTCCCTACCTGGATGGTACCTTCTACCTGAACCACACTTTTAAGA
AGGTTTCCATCATGTTTGACTCTTCAGTGAGCTGGCCTGGAAATGACAGGTTACTATCTCCTAACGAATT
TGAAATAAAGCGCACTGTGGATGGCGAAGGCTACAACGTAGCCCAATGCAACATGACCAAAGACTGGTTC
TTGGTACAGATGCTCGCCAACTACAACATCGGCTATCAGGGCTTCTACATTCCAGAAGGATACAAAGATC
GCATGTATTCATTTTTCAGAAACTTCCAGCCCATGAGCAGGCAGGTGGTTGATGAGGTCAATTACAAAGA
CTTCAAGGCCGTCGCCATACCCTACCAACACAACAACTCTGGCTTTGTGGGTTACATGGCTCCGACCATG
CGCCAAGGTCAACCCTATCCCGCTAACTATCCCTATCCACTCATTGGAACAACTGCCGTAAATAGTGTTA
CGCAGAAAAAGTTCTTGTGTGACAGAACCATGTGGCGCATACCGTTCTCGAGCAACTTCATGTCTATGGG
GGCCCTTACAGACTTGGGACAGAATATGCTCTATGCCAACTCAGCTCATGCTCTGGACATGACCTTTGAG
GTGGATCCCATGGATGAGCCCACCCTGCTTTATCTTCTCTTCGAAGTTTTCGACGTGGTCAGAGTGCATC
AGCCACACCGCGGCATCATCGAGGCAGTCTACCTGCGTACACCGTTCTCGGCCGGTAACGCTACCACGTA
AGAAGCTTCTTGCTTCTTGCAAATAGCAGCTGCAACCATGGCCTGCGGATCCCAAAACGGCTCCAGCGAG
CAAGAGCTCAGAGCCATTGTCCAAGACCTGGGTTGCGGACCCTATTTTTTGGGAACCTACGATAAGCGCT
TCCCGGGGTTCATGGCCCCCGATAAGCTCGCCTGTGCCATTGTAAATACGGCCGGACGTGAGACGGGGGG
AGAGCACTGGTTGGCTTTCGGTTGGAACCCACGTTCTAACACCTGCTACCTTTTTGATCCTTTTGGATTC
TCGGATGATCGTCTCAAACAGATTTACCAGTTTGAATATGAGGGTCTCCTGCGCCGCAGCGCTCTTGCTA
CCAAGGACCGCTGTATTACGCTGGAAAAATCTACCCAGACCGTGCAGGGCCCCCGTTCTGCCGCCTGCGG
ACTTTTCTGCTGCATGTTCCTTCACGCCTTTGTGCACTGGCCTGACCGTCCCATGGACGGAAACCCCACC
ATGAAATTGCTAACTGGAGTGCCAAACAACATGCTTCATTCTCCTAAAGTCCAGCCCACCCTGTGTGACA
ATCAAAAAGCACTCTACCATTTTCTTAATACCCATTCGCCTTATTTTCGCTCTCATCGTACACACATCGA
AAGGGCCACTGCGTTCGACCGTATGGATGTTCAATAATGACTCATGTAAACAACGTGTTCAATAAACATC
ACTTTATTTTTTTACATGTATCAAGGCTCTGGATTACTTATTTATTTACAAGTCGAATGGGTTCTGACGA
GAATCAGAATGACCCGCAGGCAGTGATACGTTGCGGAACTGATACTTGGGTTGCCACTTGAATTCGGGAA
TCACCAACTTGGGAACCGGTATATCGGGCAGGATGTCACTCCACAGCTTTCTGGTCAGCTGCAAAGCTCC
AAGCAGGTCAGGAGCCGAAATCTTGAAATCACAATTAGGACCAGTGCTCTGAGCGCGAGAGTTGCGGTAC
ACCGGATTGCAGCACTGAAACACCATCAGCGACGGATGTCTCACGCTTGCCAGCACGGTGGGATCTGCAA
TCATGCCCACATCCAGATCTTCAGCATTGGCAATGCTGAACGGGGTCATCTTGCAGGTCTGCCTACCCAT
GGCGGGCACCCAATTAGGCTTGTGGTTGCAATCGCAGTGCAGGGGGATCAGTATCATCTTGGCCTGATCC
TGTCTGATTCCTGGATACACGGCTCTCATGAAAGCATCATATTGCTTGAAAGCCTGCTGGGCTTTACTAC
CCTCGGTATAAAACATCCCGCAGGACCTGCTCGAAAACTGGTTAGCTGCACAGCCGGCATCATTCACACA
GCAGCGGGCGTCATTGTTGGCTATTTGCACCACACTTCTGCCCCAGCGGTTTTGGGTGATTTTGGTTCGC
TCGGGATTCTCCTTTAAGGCTCGTTGTCCGTTCTCGCTGGCCACATCCATCTCGATAATCTGCTCCTTCT
GAATCATAATATTGCCATGCAGGCACTTCAGCTTGCCCTCATAATCATTGCAGCCATGAGGCCACAACGC
ACAGCCTGTACATTCCCAATTATGGTGGGCGATCTGAGAAAAAGAATGTATCATTCCCTGCAGAAATCTT
CCCATCATCGTGCTCAGTGTCTTGTGACTAGTGAAAGTTAACTGGATGCCTCGGTGCTCTTCGTTTACGT
ACTGGTGACAGATGCGCTTGTATTGTTCGTGTTGCTCAGGCATTAGTTTAAAACAGGTTCTAAGTTCGTT
ATCCAGCCTGTACTTCTCCATCAGCAGACACATCACTTCCATGCCTTTCTCCCAAGCAGACACCAGGGGC
AAGCTAATCGGATTCTTAACAGTGCAGGCAGCAGCTCCTTTAGCCAGAGGGTCATCTTTAGCGATCTTCT
CAATGCTTCTTTTGCCATCCTTCTCAACGATGCGCACGGGCGGGTAGCTGAAACCCACTGCTACAAGTTG
CGCCTCTTCTCTTTCTTCTTCGCTGTCTTGACTGATGTCTTGCATGGGGATATGTTTGGTCTTCCTTGGC
TTCTTTTTGGGGGGTATCGGAGGAGGAGGACTGTCGCTCCGTTCCGGAGACAGGGAGGATTGTGACGTTT
CGCTCACCATTACCAACTGACTGTCGGTAGAAGAACCTGACCCCACACGGCGACAGGTGTTTTTCTTCGG
GGGCAGAGGTGGAGGCGATTGCGAAGGGCTGCGGTCCGACCTGGAAGGCGGATGACTGGCAGAACCCCTT
CCGCGTTCGGGGGTGTGCTCCCTGTGGCGGTCGCTTAACTGATTTCCTTCGCGGCTGGCCATTGTGTTCT
CCTAGGCAGAGAAACAACAGACATGGAAACTCAGCCATTGCTGTCAACATCGCCACGAGTGCCATCACAT
CTCGTCCTCAGCGACGAGGAAAAGGAGCAGAGCTTAAGCATTCCACCGCCCAGTCCTGCCACCACCTCTA
CCCTAGAAGATAAGGAGGTCGACGCATCTCATGACATGCAGAATAAAAAAGCGAAAGAGTCTGAGACAGA
CATCGAGCAAGACCCGGGCTATGTGACACCGGTGGAACACGAGGAAGAGTTGAAACGCTTTCTAGAGAGA
GAGGATGAAAACTGCCCAAAACAGCGAGCAGATAACTATCACCAAGATGCTGGAAATAGGGATCAGAACA
CCGACTACCTCATAGGGCTTGACGGGGAAGACGCGCTCCTTAAACATCTAGCAAGACAGTCGCTCATAGT
CAAGGATGCATTATTGGACAGAACTGAAGTGCCCATCAGTGTGGAAGAGCTCAGCTGCGCCTACGAGCTT
AACCTTTTTTCACCTCGTACTCCCCCCAAACGTCAGCCAAACGGCACCTGCGAGCCAAATCCTCGCTTAA
ACTTTTATCCAGCTTTTGCTGTGCCAGAAGTACTGGCTACCTATCACATCTTTTTTAAAAATCAAAAAAT
TCCAGTCTCCTGCCGCGCTAATCGCACCCGCGCCGATGCCCTACTCAATCTGGGACCTGGTTCACGCTTA
CCTGATATAGCTTCCTTGGAAGAGGTTCCAAAGATCTTCGAGGGTCTGGGCAATAATGAGACTCGGGCCG
CAAATGCTCTGCAAAAGGGAGAAAATGGCATGGATGAGCATCACAGCGTTCTGGTGGAATTGGAAGGCGA
TAATGCCAGACTCGCAGTACTCAAGCGAAGCGTCGAGGTCACACACTTCGCATATCCCGCTGTCAACCTG
CCCCCTAAAGTCATGACGGCGGTCATGGACCAGTTACTCATTAAGCGCGCAAGTCCCCTTTCAGAAGACA
TGCATGACCCAGATGCCTGTGATGAGGGTAAACCAGTGGTCAGTGATGAGCAGCTAACCCGATGGCTGGG
CACCGACTCTCCCCGGGATTTGGAAGAGCGTCGCAAGCTTATGATGGCCGTGGTGCTGGTTACCGTAGAA
CTAGAGTGTCTCCGACGTTTCTTTACCGATTCAGAAACCTTGCGCAAACTCGAAGAGAATCTGCACTACA
CTTTTAGACACGGCTTTGTGCGGCAGGCATGCAAGATATCTAACGTGGAACTCACCAACCTGGTTTCCTA
CATGGGTATTCTGCATGAGAATCGCCTAGGACAAAGCGTGCTGCACAGCACCCTTAAGGGGGAAGCCCGC
CGTGATTACATCCGCGATTGTGTCTATCTCTACCTGTGCCACACGTGGCAAACCGGCATGGGTGTATGGC
AGCAATGTTTAGAAGAACAGAACTTGAAAGAGCTTGACAAGCTCTTACAGAAATCTCTTAAGGTTCTGTG
GACAGGGTTCGACGAGCGCACCGTCGCTTCCGACCTGGCAGACCTCATCTTCCCAGAGCGTCTCAGGGTT
ACTTTGCGAAACGGATTGCCTGACTTTATGAGCCAGAGCATGCTTAACAATTTTCGCTCTTTCATCCTGG
AACGCTCCGGTATCCTGCCCGCCACCTGCTGCGCACTGCCCTCCGACTTTGTGCCTCTCACCTACCGCGA
GTGCCCCCCGCCGCTATGGAGTCACTGCTACCTGTTCCGTCTGGCCAACTATCTCTCCTACCACTCGGAT
GTGATCGAGGATGTGAGCGGAGACGGCTTGCTGGAGTGCCACTGCCGCTGCAATCTGTGCACGCCCCACC
GGTCCCTAGCTTGCAACCCCCAGTTGATGAGCGAAACCCAGATAATAGGCACCTTTGAATTGCAAGGCCC
CAGCAGCCAAGGCGATGGGTCTTCTCCTGGGCAAAGTTTAAAACTGACCCCGGGACTGTGGACCTCCGCC
TACTTGCGCAAGTTTGCTCCGGAAGATTACCACCCCTATGAAATCAAGTTCTATGAGGACCAATCACAGC
CTCCAAAGGCCGAACTTTCGGCTTGCGTCATCACCCAGGGGGCAATTCTGGCCCAATTGCAAGCCATCCA
AAAATCCCGCCAAGAATTTCTACTGAAAAAGGGTAAGGGGGTCTACCTTGACCCCCAGACCGGCGAGGAA
CTCAACACAAGGTTCCCTCAGGATGTCCCAACGACGAGAAAACAAGAAGTTGAAGGTGCAGCCGCCGCCC
CCAGAAGATATGGAGGAAGATTGGGACAGTCAGGCAGAGGAGGCGGAGGAGGACAGTCTGGAGGACAGTC
TGGAGGAAGACAGTTTGGAGGAGGAAAACGAGGAGGCAGAGGAGGTGGAAGAAGTAACCGCCGACAAACA
GTTATCCTCGGCTGCGGAGACAAGCAACAGCGCTACCATCTCCGCTCCGAGTCGAGGAACCCGGCGGCGT
CCCAGCAGTAGATGGGACGAGACCGGACGCTTCCCGAACCCAACCAGCGCTTCCAAGACCGGTAAGAAGG
ATCGGCAGGGATACAAGTCCTGGCGGGGGCATAAGAATGCCATCATCTCCTGCTTGCATGAGTGCGGGGG
CAACATATCCTTCACGCGGCGCTACTTGCTATTCCACCATGGGGTGAACTTTCCGCGCAATGTTTTGCAT
TACTACCGTCACCTCCACAGCCCCTACTATAGCCAGCAAATCCCGACAGTCTCGACAGATAAAGACAGCG
GCGGCGACCTCCAACAGAAAACCAGCAGCGGCAGTTAGAAAATACACAACAAGTGCAGCAACAGGAGGAT
TAAAGATTACAGCCAACGAGCCAGCGCAAACCCGAGAGTTAAGAAATCGGATCTTTCCAACCCTGTATGC
CATCTTCCAGCAGAGTCGGGGTCAAGAGCAGGAACTGAAAATAAAAAACCGATCTCTGCGTTCGCTCACC
AGAAGTTGTTTGTATCACAAGAGCGAAGATCAACTTCAGCGCACTCTCGAGGACGCCGAGGCTCTCTTCA
ACAAGTACTGCGCGCTGACTCTTAAAGAGTAGGCAGCGACCGCGCTTATTCAAAAAAGGCGGGAATTACA
TCATCCTCGACATGAGTAAAGAAATTCCCACGCCTTACATGTGGAGTTATCAACCCCAAATGGGATTGGC
AGCAGGCGCCTCCCAGGACTACTCCACCCGCATGAATTGGCTCAGCGCCGGGCCTTCTATGATTTCTCGA
GTTAATGATATACGCGCCTACCGAAACCAAATACTTTTGGAACAGTCAGCTCTTACCACCACGCCCCGCC
AACACCTTAATCCCAGAAATTGGCCCGCCGCCCTAGTGTACCAGGAAAGTCCCGCTCCCACCACTGTATT
ACTTCCTCGAGACGCCCAGGCCGAAGTCCAAATGACTAATGCAGGTGCGCAGTTAGCTGGCGGCTCCACC
CTATGTCGTCACAGGCCTCGGCATAATATAAAACGCCTGATGATCAGAGGCCGAGGTATCCAGCTCAACG
ACGAGTCGGTGAGCTCTCCGCTTGGTCTACGACCAGACGGAATCTTTCAGATTGCCGGCTGCGGGAGATC
TTCCTTCACCCCTCGTCAGGCTGTTCTGACTTTGGAAAGTTCGTCTTCGCAACCCCGCTCGGGCGGAATC
GGGACCGTTCAATTTGTAGAGGAGTTTACTCCCTCTGTCTACTTCAACCCCTTCTCCGGATCTCCTGGGC
ACTACCCGGACGAGTTCATACCGAACTTCGACGCGATTAGCGAGTCAGTGGACGGCTACGATTGATGTCT
GGTGACGCGGCTGAGCTATCTCGGCTGCGACATCTAGACCACTGCCGCCGCTTTCGCTGCTTTGCCCGGG
AACTTATTGAGTTCATCTACTTCGAACTCCCCAAGGATCACCCTCAAGGTCCGGCCCACGGAGTGCGGAT
TACTATCGAAGGCAAAATAGACTCTCGCCTGCAACGAATTTTCTCCCAGCGGCCCGTGCTGATCGAGCGA
GACCAGGGAAACACCACGGTTAGTAATCAATTACGGGGTCATTAGTTCATAGCCCATATATGGAGTTAAC
TTGTTTATTGCAGCTTATAATGGTTACAAATAAAGCAATAGCATCACAAATTTCACAAATAAAGCATTTT
TTTCACTGCATTCTAGTTGTGGTTTGTCCAAACTCATCAATGTATCTTATCATGTCTGCTCGAAGCGGCC
GGCCGCCCCGACTCTAGAGTCGCGGCCTCATTAGGAAGTTCCTATACTTTCTAGAGAATAGGAACTTCTC
AGAAGAACTCGTCAAGAAGGCGATAGAAGGCGATGCGCTGCGAATCGGGAGCGGCGATACCGTAAAGCAC
GAGGAAGCGGTCAGCCCATTCGCCGCCAAGCTCTTCAGCAATATCACGGGTAGCCAACGCTATGTCCTGA
TAGCGGTCCGCCACACCCAGCCGGCCACAGTCGATGAATCCAGAAAAGCGGCCATTTTCCACCATGATAT
TCGGCAAGCAGGCATCGCCATGGGTCACGACGAGATCCTCGCCGTCGGGCATGCGCGCCTTGAGCCTGGC
GAACAGTTCGGCTGGCGCGAGCCCCTGATGCTCTTCGTCCAGATCATCCTGATCGACAAGACCGGCTTCC
ATCCGAGTACGTGCTCGCTCGATGCGATGTTTCGCTTGGTGGTCGAATGGGCAGGTAGCCGGATCAAGCG
TATGCAGCCGCCGCATTGCATCAGCCATGATGGATACTTTCTCGGCAGGAGCAAGGTGAGATGACAGGAG
ATCCTGCCCCGGCACTTCGCCCAATAGCAGCCAGTCCCTTCCCGCTTCAGTGACAACGTCGAGCACAGCT
GCGCAAGGAACGCCCGTCGTGGCCAGCCACGATAGCCGCGCTGCCTCGTCCTGCAGTTCATTCAGGGCAC
CGGACAGGTCGGTCTTGACAAAAAGAACCGGGCGCCCCTGCGCTGACAGCCGGAACACGGCGGCATCAGA
GCAGCCGATTGCCTGTTGTGCCCAGTCATAGCCGAATAGCCTCTCCACCCAAGCGGCCGGAGAACCTGCG
TGCAATCCATCTTGTTCAATGGCCGATCCCATAACACCCCTTGTATTACTGTTTATGTAAGCAGACAGTT
TTACTGTTCGTGATGATATATTTTTATCTTGTGCAATGTAACAGGTTGTGGCCATAGCGGGCCCGGGATT
TTCCTCCACGTCCCCGCATGTTAGAAGACTTCCCCTGCCCTCGGCTCTGGAAGTTCCTATACTTTCTAGA
GAATAGGAACTTCCCGCCAGAATGCGTTCGCACAGCCGCCAGCCGGTCACTCCGTTGATGGTTACTCGGA
ACAGCAGGGAGCCGTCGGGGTTGATCAGGCGCTCGTCGATAATTTTGTTGCCGTTCCACAGGGTCCCTGT
TACAGTGATCTTTTTGCCGTCGAACACGGCGATGCCTTCATACGGCCGTCCGAAATAGTCGATCATGTTC
GGCGTAACCCCGTCGATTACCAGTGTGCCATAGTGCAGGATCACCTTAAAGTGATGATCATCCACAGGGT
ACACCACCTTAAAAATTTTTTCGATCTGGCCCATTTGGTCGCCGCTCAGACCTTCATACGGGATGATGAC
ATGGATGTCGATCTTCAGCCCATTTTCACCGCTCAGGACAATCCTTTGGATCGGAGTTACGGACACCCCG
AGATTCTGAAACAAACTGGACACACCTCCCTGTTCAAGGACTTGGTCCAGGTTGTAGCCGGCTGTCTGTC
GCCAGTCCCCAACGAAATCTTCGAGTGTGAAGACCATGGATCCGGGCCCGGGGTTTTCTTCAACGTCTCC
AGCCTGCTTCAGCAGGCTGAAGTTAGTAGCTCCGCTTCCTCGAGCTCGAGATCTGGCGAAGGCGATGGGG
GTCTTGAAGGCGTGCTGGTACTCCACGATGCCCAGCTCGGTGTTGCTGTGCAGCTCCTCCACGCGGCGGA
AGGCGAACATGGGGCCCCCGTTCTGCAGGATGCTGGGGTGGATGGCGCTCTTGAAGTGCATGTGGCTGTC
CACCACGAAGCTGTAGTAGCCGCCGTCGCGCAGGCTGAAGGTGCGGGCGAAGCTGCCCACCAGCACGTTA
TCGCCCATGGGGTGCAGGTGCTCCACGGTGGCGTTGCTGCGGATGATCTTGTCGGTGAAGATCACGCTGT
CCTCGGGGAAGCCGGTGCCCACCACCTTGAAGTCGCCGATCACGCGGCCGGCCTCGTAGCGGTAGCTGAA
GCTCACGTGCAGCACGCCGCCGTCCTCGTACTTCTCGATGCGGGTGTTGGTGTAGCCGCCGTTGTTGATG
GCGTGCAGGAAGGGGTTCTCGTAGCCGCTGGGGTAGGTGCCGAAGTGGTAGAAGCCGTAGCCCATCACGT
GGCTCAGCAGGTAGGGGCTGAAGGTCAGGGCGCCTTTGGTGCTCTTCATCTTGTTGGTCATGCGGCCCTG
CTCGGGGGTGCCCTCTCCGCCGCCCACCAGCTCGAACTCCACGCCGTTCAGGGTGCCGGTGATGCGGCAC
TCGATCTTCATGGCGGGCATGGTGGCGACCGGTAGCGCTAGCGGCTTCGGTACCACGCGTTCGCTCGAAT
TAATCAATTCTTTGCCAAAATGATGAGACAGCACAATAACCAGCACGTTGCCCAGGAGCTGTAGGAAAAA
GAAGAAGGCATGAACATGGTTAGCAGAGGCTCTAGAGCCGCCGGTCACACGCCAGAAGCCGAACCCCGCC
CTGCCCCGTCCCCCCCGAAGGCAGCCGTCCCCCCGCGGACAGCCCCGAGGCTGGAGAGGGAGAAGGGGAC
GGCGGCGCGGCGACGCACGAAGGCCCTCCCCGCCCATTTCCTTCCTGCCGGGGCCCTCCCGGAGCCCCTC
AAGGCTTTCACGCAGCCACAGAAAAGAAACAAGCCGTCATTAAACCAAGCGCTAATTACAGCCCGGAGGA
GAAGGGCCGTCCCGCCCGCTCACCTGTGGGAGTAACGCGGTCAGTCAGAGCCGGGGCGGGCGGCGCGAGG
CGGCGCGGAGCGGGGCACGGGGCGAAGGCAACGCAGCGACTCCCGCCCGCCGCGCGCTTCGCTTTTTATA
GGGCCGCCGCCGCCGCCGCCTCGCCATAAAAGGAAACTTTCGGAGCGCGCCGCTCTGATTGGCTGCCGCC
GCACCTCTCCGCCTCGCCCCGCCCCGCCCCTCGCCCCGCCCCGCCCCGCCTGGCGCGCGCCCCCCCCCCC
CCCCCGCCCCCATCGCTGCACAAAATAATTAAAAAATAAATAAATACAAAATTGGGGGTGGGGAGGGGGG
GGAGATGGGGAGAGTGAAGCAGAACGTGGGGCTCACCTCGACCATGGTAATAGCGATGACTAATACGTAG
ATGTACTGCCAAGTAGGAAAGTCCCATAAGGTCATGTACTGGGCATAATGCCAGGCGGGCCATTTACCGT
CATTGACGTCAATAGGGGGCGTACTTGGCATATGATACACTTGATGTACTGCCAAGTGGGCAGTTTACCG
TAAATACTCCACCCATTGACGTCAATGGAAAGTCCCTATTGGCGTTACTATGGGAACATACGTCATTATT
GACGTCAATGGGCGGGGGTCGTTGGGCGGTCAGCCAGGCGGGCCATTTACCGTAAGTTATGTAACGCGGA
ACAACAACAATTGCATTCATTTTATGTTTCAGGTTCAGGGGGAGGTGTGGTCCTGCGATTCCATCGAGTG
CACCTACACCCTGCTGAAGACCCTATGCGGCCTAAGAGACCTGCTACCAATGAATTAAAAAAAAATGATT
AATAAAAAATCACTTACTTGAAATCAGCAATAAGGTCTCTGTTGAAATTTTCTCCCAGCAGCACCTCACT
TCCCTCTTCCCAACTCTGGTATTCTAAACCCCGTTCAGCGGCATACTTTCTCCATACTTTAAAGGGGATG
TCAAATTTTAGCTCCTCTCCTGTACCCACAATCTTCATGTCTTTCTTCCCAGATGACCAAGAGAGTCCGG
CTCAGTGACTCCTTCAACCCTGTCTACCCCTATGAAGATGAAAGCACCTCCCAACACCCCTTTATAAACC
CAGGGTTTATTTCCCCAAATGGCTTCACACAAAGCCCAGACGGAGTTCTTACTTTAAAATGTTTAACCCC
ACTAACAACCACAGGCGGATCTCTACAGCTAAAAGTGGGAGGGGGACTTACAGTGGATGACACTGATGGT
ACCTTACAAGAAAACATACGTGCTACAGCACCCATTACTAAAAATAATCACTCTGTAGAACTATCCATTG
GAAATGGATTAGAAACTCAAAACAATAAACTATGTGCCAAATTGGGAAATGGGTTAAAATTTAACAACGG
TGACATTTGTATAAAGGATAGTATTAACACCTTATGGACTGGAATAAACCCTCCACCTAACTGTCAAATT
GTGGAAAACACTAATACAAATGATGGCAAACTTACTTTAGTATTAGTAAAAAATGGAGGGCTTGTTAATG
GCTACGTGTCTCTAGTTGGTGTATCAGACACTGTGAACCAAATGTTCACACAAAAGACAGCAAACATCCA
ATTAAGATTATATTTTGACTCTTCTGGAAATCTATTAACTGAGGAATCAGACTTAAAAATTCCACTTAAA
AATAAATCTTCTACAGCGACCAGTGAAACTGTAGCCAGCAGCAAAGCCTTTATGCCAAGTACTACAGCTT
ATCCCTTCAACACCACTACTAGGGATAGTGAAAACTACATTCATGGAATATGTTACTACATGACTAGTTA
TGATAGAAGTCTATTTCCCTTGAACATTTCTATAATGCTAAACAGCCGTATGATTTCTTCCAATGTTGCC
TATGCCATACAATTTGAATGGAATCTAAATGCAAGTGAATCTCCAGAAAGCAACATAGCTACGCTGACCA
CATCCCCCTTTTTCTTTTCTTACATTACAGAAGACGACAACTAAAATAAAGTTTAAGTGTTTTTATTTAA
AATCACAAAATTCGAGTAGTTATTTTGCCTCCACCTTCCCATTTGACAGAATACACAGTCCTTTCTCCCC
GGCTGGCCTTAAAAAGCATCATATCATGGGTAACAGACATATTCTTAGGTGTTATATTCCACACGGTTTC
CTGTCGAGCCAAACGCTCATCAGTGATATTAATAAACTCCCCGGGCAGCTCACTTAAGTTCATGTCGCTG
TCCAGCTGCTGAGCCACAGGCTGCTGTCCAACTTGCGGTTGCTTAACGGGCGGCGAAGGAGAAGTCCACG
CCTACATGGGGGTAGAGTCATAATCGTGCATCAGGATAGGGCGGTGGTGCTGCAGCAGCGCGCGAATAAA
CTGCTGCCGCCGCCGCTCCGTCCTGCAGGAATACAACATGGCAGTGGTCTCCTCAGCGATGATTCGCACC
GCCCGCAGCATAAGGCGCCTTGTCCTCCGGGCACAGCAGCGCACCCTGATCTCACTTAAATCAGCACAGT
AACTGCAGCACAGCACCACAATATTGTTCAAAATCCCACAGTGCAAGGCGCTGTATCCAAAGCTCATGGC
GGGGACCACAGAACCCACGTGGCCATCATACCACAAGCGCAGGTAGATTAAGTGGCGACCCCTCATAAAC
ACGCTGGACATAAACATTACCTCTTTTGGCATGTTGTAATTCACCACCTCCCGGTACCATATAAACCTCT
GATTAAACATGGCGCCATCCACCACCATCCTAAACCAGCTGGCCAAAACCTGCCCGCCGGCTATACACTG
CAGGGAACCGGGACTGGAACAATGACAGTGGAGAGCCCAGGACTCGTAACCATGGATCATCATGCTCGTC
ATGATATCAATGTTGGCACAACACAGGCACACGTGCATACACTTCCTCAGGATTACAAGCTCCTCCCGCG
TTAGAACCATATCCCAGGGAACAACCCATTCCTGAATCAGCGTAAATCCCACACTGCAGGGAAGACCTCG
CACGTAACTCACGTTGTGCATTGTCAAAGTGTTACATTCGGGCAGCAGCGGATGATCCTCCAGTATGGTA
GCGCGGGTTTCTGTCTCAAAAGGAGGTAGACGATCCCTACTGTACGGAGTGCGCCGAGACAACCGAGATC
GTGTTGGTCGTAGTGTCATGCCAAATGGAACGCCGGACGTAGTCATTCTCGTATTTTGTATAGCAAAACG
CGGCCCTGGCAGAACACACTCTTCTTCGCCTTCTATCCTGCCGCTTAGCGTGTTCCGTGTGATAGTTCAA
GTACAGCCACACTCTTAAGTTGGTCAAAAGAATGCTGGCTTCAGTTGTAATCAAAACTCCATCGCATCTA
ATTGTTCTGAGGAAATCATCCACGGTAGCATATGCAAATCCCAACCAAGCAATGCAACTGGATTGCGTTT
CAAGCAGGAGAGGAGAGGGAAGAGACGGAAGAACCATGTTAATTTTTATTCCAAACGATCTCGCAGTACT
TCAAATTGTAGATCGCGCAGATGGCATCTCTCGCCCCCACTGTGTTGGTGAAAAAGCACAGCTAAATCAA
AAGAAATGCGATTTTCAAGGTGCTCAACGGTGGCTTCCAACAAAGCCTCCACGCGCACATCCAAGAACAA
AAGAATACCAAAAGAAGGAGCATTTTCTAACTCCTCAATCATCATATTACATTCCTGCACCATTCCCAGA
TAATTTTCAGCTTTCCAGCCTTGAATTATTCGTGTCAGTTCTTGTGGTAAATCCAATCCACACATTACAA
ACAGGTCCCGGAGGGCGCCCTCCACCACCATTCTTAAACACACCCTCATAATGACAAAATATCTTGCTCC
TGTGTCACCTGTAGCGAATTGAGAATGGCAACATCAATTGACATGCCCTTGGCTCTAAGTTCTTCTTTAA
GTTCTAGTTGTAAAAACTCTCTCATATTATCACCAAACTGCTTAGCCAGAAGCCCCCCGGGAACAAGAGC
AGGGGACGCTACAGTGCAGTACAAGCGCAGACCTCCCCAATTGGCTCCAGCAAAAACAAGATTGGAATAA
GCATATTGGGAACCACCAGTAATATCATCGAAGTTGCTGGAAATATAATCAGGCAGAGTTTCTTGTAGAA
ATTGAATAAAAGAAAAATTTGCCAAAAAAACATTCAAAACCTCTGGGATGCAAATGCAATAGGTTACCGC
GCTGCGCTCCAACATTGTTAGTTTTGAATTAGTCTGCAAAAATAAAAAAAAAACAAGCGTCATATCATAG
TAGCCTGACGAACAGGTGGATAAATCAGTCTTTCCATCACAAGACAAGCCACAGGGTCTCCAGCTCGACC
CTCGTAAAACCTGTCATCGTGATTAAACAACAGCACCGAAAGTTCCTCGCGGTGACCAGCATGAATAAGT
CTTGATGAAGCATACAATCCAGACATGTTAGCATCAGTTAAGGAGAAAAAACAGCCAACATAGCCTTTGG
GTATAATTATGCTTAATCGTAAGTATAGCAAAGCCACCCCTCGCGGATACAAAGTAAAAGGCACAGGAGA
ATAAAAAATATAATTATTTCTCTGCTGCTGTTTAGGCAACGTCGCCCCCGGTCCCTCTAAATACACATAC
AAAGCCTCATCAGCCATGGCTTACCAGAGAAAGTACAGCGGGCACACAAACCACAAGCTCTAAAGTCACT
CTCCAACCTCTCCACAATATATATACACAAGCCCTAAACTGACGTAATGGGACTAAAGTGTAAAAAATCC
CGCCAAACCCAACACACACCCCGAAACTGCGTCACCAGGGAAAAGTACAGTTTCACTTCCGCAATCCCAA
CAAGCGTCACTTCCTCTTTCTCACGGTACGTCACATCCCATTAACTTACAACGTCATTTTCCCACGGCCG
CGCCGCCCCTTTTAACCGTTAACCCCACAGCCAATCACCACACGGCCCACACTTTTTAAAATCACCTCAT
TTACATATTGGCACCATTCCATCTATAAGGTATATTATTGATGATGGCCAAGCTATTTAGGTGACACTAT
AGAATACTCAAGCTATGCATCAAGCTTGGTACCGAGCTCGGATCCACTAGTAACGGCCGCCAGTGTGCTG
GAATTCGCCCTTGTTTAAACGCGATCGCTTGAGATCGTTTTGGTCTGCGCGTAATCTCTTGCTCTGAAAA
CGAAAAAACCGCCTTGCAGGGCGGTTTTTCGAAGGTTCTCTGAGCTACCAACTCTTTGAACCGAGGTAAC
TGGCTTGGAGGAGCGCAGTCACCAAAACTTGTCCTTTCAGTTTAGCCTTAACCGGCGCATGACTTCAAGA
CTAACTCCTCTAAATCAATTACCAGTGGCTGCTGCCAGTGGTGCTTTTGCATGTCTTTCCGGGTTGGACT
CAAGACGATAGTTACCGGATAAGGCGCAGCGGTCGGACTGAACGGGGGGTTCGTGCATACAGTCCAGCTT
GGAGCGAACTGCCTACCCGGAACTGAGTGTCAGGCGTGGAATGAGACAAACGCGGCCATAACAGCGGAAT
GACACCGGTAAACCGAAAGGCAGGAACAGGAGAGCGCACGAGGGAGCCGCCAGGGGGAAACGCCTGGTAT
CTTTATAGTCCTGTCGGGTTTCGCCACCACTGATTTGAGCGTCAGATTTCGTGATGCTTGTCAGGGGGGC
GGAGCCTATGGAAAAACGGCTTTGCCGCGGCCCTCTCACTTCCCTGTTAAGTATCTTCCTGGCATCTTCC
AGGAAATCTCCGCCCCGTTCGTAAGCCATTTCCGCTCGCCGCAGTCGAACGACCGAGCGTAGCGAGTCAG
TGAGCGAGGAAGCGGAATATATCCTGTATCACATATTCTGCTGACGCACCGGTGCAGCCTTTTTTCTCCT
GCCACATGAAGCACTTCACTGACACCCTCATCAGTGCCAACATAGTAAGCCAGTATACACTCCGCTAGCG
CGATCGCTTAATTAATTTAAATCCTGCAGGGTTTAAACGGCCGGCCTAGGGATAACAGGGTAATCGTAAC
TATAACGGTCCTAAGGTAGCGAATGATGTCCGGCGGTGCTTTTGCCGTTACGCACCACCCCGTCAGTAGC
TGAACAGGAGGGACAGCTGATAGAAACAGAAGCCACTGGAGCACCTCAAAAACACCATCATACACTAAAT
CAGTAAGTTGGCAGCATCACCCGACGCACTTTGCGCCGAATAAATACCTGTGACGGAAGATCACTTCGCA
GAATAAATAAATCCTGGTGTCCCTGTTGATACCGGGAAGCCCTGGGCCAACTTTTGGCGAAAATGAGACG
TTGATCGGCACGTAAGAGGTTCCAACTTTCACCATAATGAAATAAGATCACTACCGGGCGTATTTTTTGA
GTTATCGAGATTTTCAGGAGCTAAGGAAGCTAAAATGGAGAAAAAAATCACTGGATATACCACCGTTGAT
ATATCCCAATGGCATCGTAAAGAACATTTTGAGGCATTTCAGTCAGTTGCTCAATGTACCTATAACCAGA
CCGTTCAGCTGGATATTACGGCCTTTTTAAAGACCGTAAAGAAAAATAAGCACAAGTTTTATCCGGCCTT
TATTCACATTCTTGCCCGCCTGATGAATGCTCATCCGGAATTCCGTATGGCAATGAAAGACGGTGAGCTG
GTGATATGGGATAGTGTTCACCCTTGTTACACCGTTTTCCATGAGCAAACTGAAACGTTTTCATCGCTCT
GGAGTGAATACCACGACGATTTCCGGCAGTTTCTACACATATATTCGCAAGATGTGGCGTGTTACGGTGA
AAACCTGGCCTATTTCCCTAAAGGGTTTATTGAGAATATGTTTTTCGTCTCAGCCAATCCCTGGGTGAGT
TTCACCAGTTTTGATTTAAACGTGGCCAATATGGACAACTTCTTCGCCCCCGTTTTCACCATGGGCAAAT
ATTATACGCAAGGCGACAAGGTGCTGATGCCGCTGGCGATTCAGGTTCATCATGCCGTCTGTGATGGCTT
CCATGTCGGCAGAATGCTTAATGAATTACAACAGTACTGCGATGAGTGGCAGGGCGGGGCGTAACCTGCA
GGTTAATTAAGGAAGGGCGAATTCTGCAGATATCCATCACACTGGCGGCCGCTCGAGCATGCATCTAGAG
GGCCCAATTCGCCCTATAGTGAGTCGTATTACAATTCACTGGCC (SEQ ID NO: 175)
The nucleotide sequence of PS2:
CATCATCAATAATATACCTTATAGATGGAATGGTGCCAATATGTAAATGAGGTGATTTTAAAAAGTGTGG
GCCGTGTGGTGATTGGCTGTGGGGTTAACGGTTAAAAGGGGCGGCGCGGCCGTGGGAAAATGACGTTTTA
TGGGGGTGGAGTTTTTTTGCAAGTTGTCGCGGGAAATGATAACTTCGTATAGCATACATTATACGAAGTT
ATTAGACTTTGACCCATTACGTGGAGGTTTCGATTACCGTGTTTTTTACCTGAATTTCCGCGTACCGTGT
CAAAGTCTTCTGTTTTTACGTAGGTGTCAGCTGATCGCTAGGGTATTTATAACTTCGTATAGCATACATT
ATACGAAGTTATGGAATGTTTATGCCTTACCAGTGTAACATGAATCATGTGAAAGTGTTGTTGGAACCAG
ATGCCTTTTCCAGAATGAGCCTAACAGGAATCTTTGACATGAACACGCAAATCTGGAAGATCCTGAGGTA
TGATGATACGAGATCGAGGGTGCGCGCATGCGAATGCGGAGGCAAGCATGCCAGGTTCCAGCCGGTGTGT
GTAGATGTGACCGAAGATCTCAGACCGGATCATTTGGTTATTGCCCGCACTGGAGCAGAGTTCGGATCCA
GTGGAGAAGAAACTGACTAAGGTGAGTATTGGGAAAACTTTGGGGTGGGATTTTCAGATGGACAGATTGA
GTAAAAATTTGTTTTTTCTGTCTTGCAGCTGACATGAGTGGAAATGCTTCTTTTAAGGGGGGAGTCTTCA
GCCCTTATCTGACAGGGCGTCTCCCATCCTGGGCAGGAGTTCGTCAGAATGTTATGGGATCTACTGTGGA
TGGAAGACCCGTTCAACCCGCCAATTCTTCAACGCTGACCTATGCTACTTTAAGTTCTTCACCTTTGGAC
GCAGCTGCAGCCGCTGCCGCCGCCTCTGTCGCCGCTAACACTGTGCTTGGAATGGGTTACTATGGAAGCA
TCGTGGCTAATTCCACTTCCTCTAATAACCCTTCTACACTGACTCAGGACAAGTTACTTGTCCTTTTGGC
CCAGCTGGAGGCTTTGACCCAACGTCTGGGTGAACTTTCTCAGCAGGTGGCCGAGTTGCGAGTACAAACT
GAGTCTGCTGTCGGCACGGCAAAGTCTAAATAAAAAAAATTCCAGAATCAATGAATAAATAAACGAGCTT
GTTGTTGATTTAAAATCAAGTGTTTTTATTTCATTTTTCGCGCACGGTATGCCCTGGACCACCGATCTCG
ATCATTGAGAACTCGGTGGATTTTTTCCAGAATCCTATAGAGGTGGGATTGAATGTTTAGATACATGGGC
ATTAGGCCGTCTTTGGGGTGGAGATAGCTCCATTGAAGGGATTCATGCTCCGGGGTAGTGTTGTAAATCA
CCCAGTCATAACAAGGTCGCAGTGCATGGTGTTGCACAATATCTTTTAGAAGTAGGCTGATTGCCACAGA
TAAGCCCTTGGTGTAGGTGTTTACAAACCGGTTGAGCTGGGAGGGGTGCATTCGAGGTGAAATTATGTGC
ATTTTGGATTGGATTTTTAAGTTGGCAATATTGCCGCCAAGATCCCGTCTTGGGTTCATGTTATGAAGGA
CTACCAAGACGGTGTATCCGGTACATTTAGGAAATTTATCGTGCAGCTTGGATGGAAAAGCGTGGAAAAA
TTTGGAGACACCCTTGTGTCCTCCGAGATTTTCCATGCACTCATCCATGATAATAGCAATGGGGCCGTGG
GCAGCGGCGCGGGCAAACACGTTCCGTGGGTCTGACACATCATAGTTATGTTCCTGAGTTAAATCATCAT
AAGCCATTTTAATGAATTTGGGGCGGAGCGTACCAGATTGGGGTATGAATGTTCCTTCGGGCCCCGGAGC
ATAGTTCCCCTCACAGATTTGCATTTCCCAAGCTTTCAGTTCTGAGGGTGGAATCATGTCCACCTGGGGG
GCTATGAAGAACACCGTTTCGGGGGCGGGGGTGATTAGTTGGGATGATAGCAAGTTTCTGAGCAATTGAG
ATTTGCCACATCCGGTGGGGCCATAAATAATTCCGATTACAGGTTGCAGGTGGTAGTTTAGGGAACGGCA
ACTGCCGTCTTCTCGAAGCAAGGGGGCCACCTCGTTCATCATTTCCCTTACATGCATATTTTCCCGCACC
AAATCCATTAGGAGGCGCTCTCCTCCTAGTGATAGAAGTTCTTGTAGTGAGGAAAAGTTTTTCAGCGGTT
TTAGACCGTCAGCCATGGGCATTTTGGAAAGAGTTTGCTGCAAAAGTTCTAGTCTGTTCCACAGTTCAGT
GATGTGTTCTATGGCATCTCGATCCAGCAGACCTCCTCGTTTCGCGGGTTTGGACGGCTCCTGGAGTAGG
GTATGAGACGATGGGCGTCCAGCGCTGCCAGGGTTCGGTCCTTCCAGGGTCTCAGTGTTCGAGTCAGGGT
TGTTTCCGTCACAGTGAAGGGGTGTGCGCCTGCTTGGGCGCTTGCCAGGGTGCGCTTCAGACTCATTCTG
CTGGTGGAGAACTTCTGTCGCTTGGCGCCCTGTATGTCGGCCAAGTAGCAGTTTACCATGAGTTCGTAGT
TGAGCGCCTCGGCTGCGTGGCCTTTGGCGCGGAGCTTACCTTTGGAAGTTTTCTTGCATACCGGGCAGTA
TAGGCATTTCAGCGCATACAGCTTGGGCGCAAGGAAAATGGATTCTGGGGAGTATGCATCCGCGCCGCAG
GAGGCGCAAACAGTTTCACATTCCACCAGCCAGGTTAAATCCGGTTCATTGGGGTCAAAAACAAGTTTTC
CGCCATATTTTTTGATGCGTTTCTTACCTTTGGTCTCCATAAGTTCGTGTCCTCGTTGAGTGACAAACAG
GCTGTCCGTATCTCCGTAGACTGATTTTACAGGCCTCTTCTCCAGTGGAGTGCCTCGGTCTTCTTCGTAC
AGGAACTCTGACCACTCTGATACAAAGGCGCGCGTCCAGGCCAGCACAAAGGAGGCTATGTGGGAGGGGT
AGCGATCGTTGTCAACCAGGGGGTCCACCTTTTCCAAAGTATGCAAACACATGTCACCCTCTTCAACATC
CAGGAATGTGATTGGCTTGTAGGTGTATTTCACGTGACCTGGGGTCCCCGCTGGGGGGGTATAAAAGGGG
GCGGTTCTTTGCTCTTCCTCACTGTCTTCCGGATCGCTGTCCAGGAACGTCAGCTGTTGGGGTAGGTATT
CCCTCTCGAAGGCGGGCATGACCTCTGCACTCAGGTTGTCAGTTTCTAAGAACGAGGAGGATTTGATATT
GACAGTGCCGGTTGAGATGCCTTTCATGAGGTTTTCGTCCATTTGGTCAGAAAACACAATTTTTTTATTG
TCAAGTTTGGTGGCAAATGATCCATACAGGGCGTTGGATAAAAGTTTGGCAATGGATCGCATGGTTTGGT
TCTTTTCCTTGTCCGCGCGCTCTTTGGCGGCGATGTTGAGTTGGACATACTCGCGTGCCAGGCACTTCCA
TTCGGGGAAGATAGTTGTTAATTCATCTGGCACGATTCTCACTTGCCACCCTCGATTATGCAAGGTAATT
AAATCCACACTGGTGGCCACCTCGCCTCGAAGGGGTTCATTGGTCCAACAGAGCCTACCTCCTTTCCTAG
AACAGAAAGGGGGAAGTGGGTCTAGCATAAGTTCATCGGGAGGGTCTGCATCCATGGTAAAGATTCCCGG
AAGTAAATCCTTATCAAAATAGCTGATGGGAGTGGGGTCATCTAAGGCCATTTGCCATTCTCGAGCTGCC
AGTGCGCGCTCATATGGGTTAAGGGGACTGCCCCAGGGCATGGGATGGGTGAGAGCAGAGGCATACATGC
CACAGATGTCATAGACGTAGATGGGATCCTCAAAGATGCCTATGTAGGTTGGATAGCATCGCCCCCCTCT
GATACTTGCTCGCACATAGTCATATAGTTCATGTGATGGCGCTAGCAGCCCCGGACCCAAGTTGGTGCGA
TTGGGTTTTTCTGTTCTGTAGACGATCTGGCGAAAGATGGCGTGAGAATTGGAAGAGATGGTGGGTCTTT
GAAAAATGTTGAAATGGGCATGAGGTAGACCTACAGAGTCTCTGACAAAGTGGGCATAAGATTCTTGAAG
CTTGGTTACCAGTTCGGCGGTGACAAGTACGTCTAGGGCGCAGTAGTCAAGTGTTTCTTGAATGATGTCA
TAACCTGGTTGGTTTTTCTTTTCCCACAGTTCGCGGTTGAGAAGGTATTCTTCGCGATCCTTCCAGTACT
CTTCTAGCGGAAACCCGTCTTTGTCTGCACGGTAAGATCCTAGCATGTAGAACTGATTAACTGCCTTGTA
AGGGCAGCAGCCCTTCTCTACGGGTAGAGAGTATGCTTGAGCAGCTTTTCGTAGCGAAGCGTGAGTAAGG
GCAAAGGTGTCTCTGACCATGACTTTGAGAAATTGGTATTTGAAGTCCATGTCGTCACAGGCTCCCTGTT
CCCAGAGTTGGAAGTCTACCCGTTTCTTGTAGGCGGGGTTGGGCAAAGCGAAAGTAACATCATTGAAGAG
AATCTTACCGGCTCTGGGCATAAAATTGCGAGTGATGCGGAAAGGCTGTGGTACTTCCGCTCGATTGTTG
ATCACCTGGGCAGCTAGGACGATTTCGTCGAAACCGTTGATGTTGTGTCCTACGATGTATAATTCTATGA
AACGCGGCGTGCCTCTGACGTGAGGTAGCTTACTGAGCTCATCAAAGGTTAGGTCTGTGGGGTCAGATAA
GGCGTAGTGTTCGAGAGCCCATTCGTGCAGGTGAGGATTTGCATGTAGGAATGATGACCAAAGATCTACC
GCCAGTGCTGTTTGTAACTGGTCCCGATACTGACGAAAATGCCGGCCAATTGCCATTTTTTCTGGAGTGA
CACAGTAGAAGGTTCTGGGGTCTTGTTGCCATCGATCCCACTTGAGTTTAATGGCTAGATCGTGGGCCAT
GTTGACGAGACGCTCTTCTCCTGAGAGTTTCATGACCAGCATGAAAGGAACTAGTTGTTTGCCAAAGGAT
CCCATCCAGGTGTAAGTTTCCACATCGTAGGTCAGGAAGAGTCTTTCTGTGCGAGGATGAGAGCCGATCG
GGAAGAACTGGATTTCCTGCCACCAGTTGGAGGATTGGCTGTTGATGTGATGGAAGTAGAAGTTTCTGCG
GCGCGCCGAGCATTCGTGTTTGTGCTTGTACAGACGGCCGCAGTAGTCGCAGCGTTGCACGGGTTGTATC
TCGTGAATGAGCTGTACCTGGCTTCCCTTGACGAGAAATTTCAGTGGGAAGCCGAGGCCTGGCGATTGTA
TCTCGTGCTCTTCTATATTCGCTGTATCGGCCTGTTCATCTTCTGTTTCGATGGTGGTCATGCTGACGAG
CCCCCGCGGGAGGCAAGTCCAGACCTCGGCGCGGGAGGGGCGGAGCTGAAGGACGAGAGCGCGCAGGCTG
GAGCTGTCCAGAGTCCTGAGACGCTGCGGACTCAGGTTAGTAGGTAGGGACAGAAGATTAACTTGCATGA
TCTTTTCCAGGGCGTGCGGGAGGTTCAGATGGTACTTGATTTCCACAGGTTCGTTTGTAGAGACGTCAAT
GGCTTGCAGGGTTCCGTGTCCTTTGGGCGCCACTACCGTACCTTTGTTTTTTCTTTTGATCGGTGGTGGC
TCTCTTGCTTCTTGCATGCTCAGAAGCGGTGACGGGGACGCGCGCCGGGCGGCAGCGGTTGTTCCGGACC
CGGGGGCATGGCTGGTAGTGGCACGTCGGCGCCGCGCACGGGCAGGTTCTGGTATTGCGCTCTGAGAAGA
CTTGCGTGCGCCACCACGCGTCGATTGACGTCTTGTATCTGACGTCTCTGGGTGAAAGCTACCGGCCCCG
TGAGCTTGAACCTGAAAGAGAGTTCAACAGAATCAATTTCGGTATCGTTAACGGCAGCTTGTCTCAGTAT
TTCTTGTACGTCACCAGAGTTGTCCTGGTAGGCGATCTCCGCCATGAACTGCTCGATTTCTTCCTCCTGA
AGATCTCCGCGACCCGCTCTTTCGACGGTGGCCGCGAGGTCATTGGAGATACGGCCCATGAGTTGGGAGA
ATGCATTCATGCCCGCCTCGTTCCAGACGCGGCTGTAAACCACGGCCCCCTCGGAGTCTCTTGCGCGCAT
CACCACCTGAGCGAGGTTAAGCTCCACGTGTCTGGTGAAGACCGCATAGTTGCATAGGCGCTGAAAAAGG
TAGTTGAGTGTGGTGGCAATGTGTTCGGCGACGAAGAAATACATGATCCATCGTCTCAGCGGCATTTCGC
TAACATCGCCCAGAGCTTCCAAGCGCTCCATGGCCTCGTAGAAGTCCACGGCAAAATTAAAAAACTGGGA
GTTTCGCGCGGACACGGTCAATTCCTCCTCGAGAAGACGGATGAGTTCGGCTATGGTGGCCCGTACTTCG
CGTTCGAAGGCTCCCGGGATCTCTTCTTCCTCTTCTATCTCTTCTTCCACTAACATCTCTTCTTCGTCTT
CAGGCGGGGGCGGAGGGGGCACGCGGCGACGTCGACGGCGCACGGGCAAACGGTCGATGAATCGTTCAAT
GACCTCTCCGCGGCGGCGGCGCATGGTTTCAGTGACGGCGCGGCCGTTCTCGCGCGGTCGCAGAGTAAAA
ACACCGCCGCGCATCTCCTTAAAGTGGTGACTGGGAGGTTCTCCGTTTGGGAGGGAGAGGGCGCTGATTA
TACATTTTATTAATTGGCCCGTAGGGACTGCGCGCAGAGATCTGATCGTGTCAAGATCCACGGGATCTGA
AAACCTTTCGACGAAAGCGTCTAACCAGTCACAGTCACAAGGTAGGCTGAGTACGGCTTCTTGTGGGCGG
GGGTGGTTATGTGTTCGGTCTGGGTCTTCTGTTTCTTCTTCATCTCGGGAAGGTGAGACGATGCTGCTGG
TGATGAAATTAAAGTAGGCAGTTCTAAGACGGCGGATGGTGGCGAGGAGCACCAGGTCTTTGGGTCCGGC
TTGCTGGATACGCAGGCGATTGGCCATTCCCCAAGCATTATCCTGACATCTAGCAAGATCTTTGTAGTAG
TCTTGCATGAGCCGTTCTACGGGCACTTCTTCCTCACCCGTTCTGCCATGCATACGTGTGAGTCCAAATC
CGCGCATTGGTTGTACCAGTGCCAAGTCAGCTACGACTCTTTCGGCGAGGATGGCTTGCTGTACTTGGGT
AAGGGTGGCTTGAAAGTCATCAAAATCCACAAAGCGGTGGTAAGCCCCTGTATTAATGGTGTAAGCACAG
TTGGCCATGACTGACCAGTTAACTGTCTGGTGACCAGGGCGCACGAGCTCGGTGTATTTAAGGCGCGAAT
AGGCGCGGGTGTCAAAGATGTAATCGTTGCAGGTGCGCACCAGATACTGGTACCCTATAAGAAAATGCGG
CGGTGGTTGGCGGTAGAGAGGCCATCGTTCTGTAGCTGGAGCGCCAGGGGCGAGGTCTTCCAACATAAGG
CGGTGATAGCCGTAGATGTACCTGGACATCCAGGTGATTCCTGCGGCGGTAGTAGAAGCCCGAGGAAACT
CGCGTACGCGGTTCCAAATGTTGCGTAGCGGCATGAAGTAGTTCATTGTAGGCACGGTTTGACCAGTGAG
GCGCGCGCAGTCATTGATGCTCTATAGACACGGAGAAAATGAAAGCGTTCAGCGACTCGACTCCGTAGCC
TGGAGGAACGTGAACGGGTTGGGTCGCGGTGTACCCCGGTTCGAGACTTGTACTCGAGCCGGCCGGAGCC
GCGGCTAACGTGGTATTGGCACTCCCGTCTCGACCCAGCCTACAAAAATCCAGGATACGGAATCGAGTCG
TTTTGCTGGTTTCCGAATGGCAGGGAAGTGAGTCCTATTTTTTTTTTTTTTGCCGCTCAGATGCATCCCG
TGCTGCGACAGATGCGCCCCCAACAACAGCCCCCCTCGCAGCAGCAGCAGCAGCAACCACAAAAGGCTGT
CCCTGCAACTACTGCAACTGCCGCCGTGAGCGGTGCGGGACAGCCCGCCTATGATCTGGACTTGGAAGAG
GGCGAAGGACTGGCACGTCTAGGTGCGCCTTCGCCCGAGCGGCATCCGCGAGTTCAACTGAAAAAAGATT
CTCGCGAGGCGTATGTGCCCCAACAGAACCTATTTAGAGACAGAAGCGGCGAGGAGCCGGAGGAGATGCG
AGCTTCCCGCTTTAACGCGGGTCGTGAGCTGCGTCACGGTTTGGACCGAAGACGAGTGTTGCGAGACGAG
GATTTCGAAGTTGATGAAGTGACAGGGATCAGTCCTGCCAGGGCACACGTGGCTGCAGCCAACCTTGTAT
CGGCTTACGAGCAGACAGTAAAGGAAGAGCGTAACTTCCAAAAGTCTTTTAATAATCATGTGCGAACCCT
GATTGCCCGCGAAGAAGTTACCCTTGGTTTGATGCATTTGTGGGATTTGATGGAAGCTATCATTCAGAAC
CCTACTAGCAAACCTCTGACCGCCCAGCTGTTTCTGGTGGTGCAACACAGCAGAGACAATGAGGCTTTCA
GAGAGGCGCTGCTGAACATCACCGAACCCGAGGGGAGATGGTTGTATGATCTTATCAACATTCTACAGAG
TATCATAGTGCAGGAGCGGAGCCTGGGCCTGGCCGAGAAGGTAGCTGCCATCAATTACTCGGTTTTGAGC
TTGGGAAAATATTACGCTCGCAAAATCTACAAGACTCCATACGTTCCCATAGACAAGGAGGTGAAGATAG
ATGGGTTCTACATGCGCATGACGCTCAAGGTCTTGACCCTGAGCGATGATCTTGGGGTGTATCGCAATGA
CAGAATGCATCGCGCGGTTAGCGCCAGCAGGAGGCGCGAGTTAAGCGACAGGGAACTGATGCACAGTTTG
CAAAGAGCTCTGACTGGAGCTGGAACCGAGGGTGAGAATTACTTCGACATGGGAGCTGACTTGCAGTGGC
AGCCTAGTCGCAGGGCTCTGAGCGCCGCGACGGCAGGATGTGAGCTTCCTTACATAGAAGAGGCGGATGA
AGGCGAGGAGGAAGAGGGCGAGTACTTGGAAGACTGATGGCACAACCCGTGTTTTTTGCTAGATGGAACA
GCAAGCACCGGATCCCGCAATGCGGGCGGCGCTGCAGAGCCAGCCGTCCGGCATTAACTCCTCGGACGAT
TGGACCCAGGCCATGCAACGTATCATGGCGTTGACGACTCGCAACCCCGAAGCCTTTAGACAGCAACCCC
AGGCCAACCGTCTATCGGCCATCATGGAAGCTGTAGTGCCTTCCCGATCTAATCCCACTCATGAGAAGGT
CCTGGCCATCGTGAACGCGTTGGTGGAGAACAAAGCTATTCGTCCAGATGAGGCCGGACTGGTATACAAC
GCTCTCTTAGAACGCGTGGCTCGCTACAACAGTAGCAATGTGCAAACCAATTTGGACCGTATGATAACAG
ATGTACGCGAAGCCGTGTCTCAGCGCGAAAGGTTCCAGCGTGATGCCAACCTGGGTTCGCTGGTGGCGTT
AAATGCTTTCTTGAGTACTCAGCCTGCTAATGTGCCGCGTGGTCAACAGGATTATACTAACTTTTTAAGT
GCTTTGAGACTGATGGTATCAGAAGTACCTCAGAGCGAAGTGTATCAGTCCGGTCCTGATTACTTCTTTC
AGACTAGCAGACAGGGCTTGCAGACGGTAAATCTGAGCCAAGCTTTTAAAAACCTTAAAGGTTTGTGGGG
AGTGCATGCCCCGGTAGGAGAAAGAGCAACCGTGTCTAGCTTGTTAACTCCGAACTCCCGCCTGTTATTA
CTGTTGGTAGCTCCTTTCACCGACAGCGGTAGCATCGACCGTAATTCCTATTTGGGTTACCTACTAAACC
TGTATCGCGAAGCCATAGGGCAAAGTCAGGTGGACGAGCAGACCTATCAAGAAATTACCCAAGTCAGTCG
CGCTTTGGGACAGGAAGACACTGGCAGTTTGGAAGCCACTCTGAACTTCTTGCTTACCAATCGGTCTCAA
AAGATCCCTCCTCAATATGCTCTTACTGCGGAGGAGGAGAGGATCCTTAGATATGTGCAGCAGAGCGTGG
GATTGTTTCTGATGCAAGAGGGGGCAACTCCGACTGCAGCACTGGACATGACAGCGCGAAATATGGAGCC
CAGCATGTATGCCAGTAACCGACCTTTCATTAACAAACTGCTGGACTACTTGCACAGAGCTGCCGCTATG
AACTCTGATTATTTCACCAATGCCATCTTAAACCCGCACTGGCTGCCCCCACCTGGTTTCTACACGGGCG
AATATGACATGCCCGACCCTAATGACGGATTTCTGTGGGACGACGTGGACAGCGATGTTTTTTCACCTCT
TTCTGATCATCGCACGTGGAAAAAGGAAGGCGGTGATAGAATGCATTCTTCTGCATCGCTGTCCGGGGTC
ATGGGTGCTACCGCGGCTGAGCCCGAGTCTGCAAGTCCTTTTCCTAGTCTACCCTTTTCTCTACACAGTG
TACGTAGCAGCGAAGTGGGTAGAATAAGTCGCCCGAGTTTAATGGGCGAAGAGGAGTACCTAAACGATTC
CTTGCTCAGACCGGCAAGAGAAAAAAATTTCCCAAACAATGGAATAGAAAGTTTGGTGGATAAAATGAGT
AGATGGAAGACTTATGCTCAGGATCACAGAGACGAGCCTGGGATCATGGGGACTACAAGTAGAGCGAGCC
GTAGACGCCAGCGCCATGACAGACAGAGGGGTCTTGTGTGGGACGATGAGGATTCGGCCGATGATAGCAG
CGTGTTGGACTTGGGTGGGAGAGGAAGGGGCAACCCGTTTGCTCATTTGCGCCCTCGCTTGGGTGGTATG
TTGTGAAAAAAAATAAAAAAGAAAAACTCACCAAGGCCATGGCGACGAGCGTACGTTCGTTCTTCTTTAT
TATCTGTGTCTAGTATAATGAGGCGAGTCGTGCTAGGCGGAGCGGTGGTGTATCCGGAGGGTCCTCCTCC
TTCGTACGAGAGCGTGATGCAGCAGCAGCAGGCGACGGCGGTGATGCAATCCCCACTGGAGGCTCCCTTT
GTGCCTCCGCGATACCTGGCACCTACGGAGGGCAGAAACAGCATTCGTTACTCGGAACTGGCACCTCAGT
ACGATACCACCAGGTTGTATCTGGTGGACAACAAGTCGGCGGACATTGCTTCTCTGAACTATCAGAATGA
CCACAGCAACTTCTTGACCACGGTGGTGCAGAACAATGACTTTACCCCTACGGAAGCCAGCACCCAGACC
ATTAACTTTGATGAACGATCGCGGTGGGGCGGTCAGCTAAAGACCATCATGCATACTAACATGCCAAACG
TGAACGAGTATATGTTTAGTAACAAGTTCAAAGCGCGTGTGATGGTGTCCAGAAAACCTCCCGACGGTGC
TGCAGTTGGGGATACTTATGATCACAAGCAGGATATTTTGGAATATGAGTGGTTCGAGTTTACTTTGCCA
GAAGGCAACTTTTCAGTTACTATGACTATTGATTTGATGAACAATGCCATCATAGATAATTACTTGAAAG
TGGGTAGACAGAATGGAGTGCTTGAAAGTGACATTGGTGTTAAGTTCGACACCAGGAACTTCAAGCTGGG
ATGGGATCCCGAAACCAAGTTGATCATGCCTGGAGTGTATACGTATGAAGCCTTCCATCCTGACATTGTC
TTACTGCCTGGCTGCGGAGTGGATTTTACCGAGAGTCGTTTGAGCAACCTTCTTGGTATCAGAAAAAAAC
AGCCATTTCAAGAGGGTTTTAAGATTTTGTATGAAGATTTAGAAGGTGGTAATATTCCGGCCCTCTTGGA
TGTAGATGCCTATGAGAACAGTAAGAAAGAACAAAAAGCCAAAATAGAAGCTGCTACAGCTGCTGCAGAA
GCTAAGGCAAACATAGTTGCCAGCGACTCTACAAGGGTTGCTAACGCTGGAGAGGTCAGAGGAGACAATT
TTGCGCCAACACCTGTTCCGACTGCAGAATCATTATTGGCCGATGTGTCTGAAGGAACGGACGTGAAACT
CACTATTCAACCTGTAGAAAAAGATAGTAAGAATAGAAGCTATAATGTGTTGGAAGACAAAATCAACACA
GCCTATCGCAGTTGGTATCTTTCGTACAATTATGGCGATCCCGAAAAAGGAGTGCGTTCCTGGACATTGC
TCACCACCTCAGATGTCACCTGCGGAGCAGAGCAGGTTTACTGGTCGCTTCCAGACATGATGAAGGATCC
TGTCACTTTCCGCTCCACTAGACAAGTCAGTAACTACCCTGTGGTGGGTGCAGAGCTTATGCCCGTCTTC
TCAAAGAGCTTCTACAACGAACAAGCTGTGTACTCCCAGCAGCTCCGCCAGTCCACCTCGCTTACGCACG
TCTTCAACCGCTTTCCTGAGAACCAGATTTTAATCCGTCCGCCGGCGCCCACCATTACCACCGTCAGTGA
AAACGTTCCTGCTCTCACAGATCACGGGACCCTGCCGTTGCGCAGCAGTATCCGGGGAGTCCAACGTGTG
ACCGTTACTGACGCCAGACGCCGCACCTGTCCCTACGTGTACAAGGCACTGGGCATAGTCGCACCGCGCG
TCCTTTCAAGCCGCACTTTCTAAAAAAAAAATGTCCATTCTTATCTCGCCCAGTAATAACACCGGTTGGG
GTCTGCGCGCTCCAAGCAAGATGTACGGAGGCGCACGCAAACGTTCTACCCAACATCCCGTGCGTGTTCG
CGGACATTTTCGCGCTCCATGGGGTGCCCTCAAGGGCCGCACTCGCGTTCGAACCACCGTCGATGATGTA
ATCGATCAGGTGGTTGCCGACGCCCGTAATTATACTCCTACTGCGCCTACATCTACTGTGGATGCAGTTA
TTGACAGTGTAGTGGCTGACGCTCGCAACTATGCTCGACGTAAGAGCCGGCGAAGGCGCATTGCCAGACG
CCACCGAGCTACCACTGCCATGCGAGCCGCAAGAGCTCTGCTACGAAGAGCTAGACGCGTGGGGCGAAGA
GCCATGCTTAGGGCGGCCAGACGTGCAGCTTCGGGCGCCAGCGCCGGCAGGTCCCGCAGGCAAGCAGCCG
CTGTCGCAGCGGCGACTATTGCCGACATGGCCCAATCGCGAAGAGGCAATGTATACTGGGTGCGTGACGC
TGCCACCGGTCAACGTGTACCCGTGCGCACCCGTCCCCCTCGCACTTAGAAGATACTGAGCAGTCTCCGA
TGTTGTGTCCCAGCGGCGAGGATGTCCAAGCGCAAATACAAGGAAGAAATGCTGCAGGTTATCGCACCTG
AAGTCTACGGCCAACCGTTGAAGGATGAAAAAAAACCCCGCAAAATCAAGCGGGTTAAAAAGGACAAAAA
AGAAGAGGAAGATGGCGATGATGGGCTGGCGGAGTTTGTGCGCGAGTTTGCCCCACGGCGACGCGTGCAA
TGGCGTGGGCGCAAAGTTCGACATGTGTTGAGACCTGGAACTTCGGTGGTCTTTACACCCGGCGAGCGTT
CAAGCGCTACTTTTAAGCGTTCCTATGATGAGGTGTACGGGGATGATGATATTCTTGAGCAGGCGGCTGA
CCGATTAGGCGAGTTTGCTTATGGCAAGCGTAGTAGAATAACTTCCAAGGATGAGACAGTGTCAATACCC
TTGGATCATGGAAATCCCACCCCTAGTCTTAAACCGGTCACTTTGCAGCAAGTGTTACCCGTAACTCCGC
GAACAGGTGTTAAACGCGAAGGTGAAGATTTGTATCCCACTATGCAACTGATGGTACCCAAACGCCAGAA
GTTGGAGGACGTTTTGGAGAAAGTAAAAGTGGATCCAGATATTCAACCTGAGGTTAAAGTGAGACCCATT
AAGCAGGTAGCGCCTGGTCTGGGGGTACAAACTGTAGACATTAAGATTCCCACTGAAAGTATGGAAGTGC
AAACTGAACCCGCAAAGCCTACTGCCACCTCCACTGAAGTGCAAACGGATCCATGGATGCCCATGCCTAT
TACAACTGACGCCGCCGGTCCCACTCGAAGATCCCGACGAAAGTACGGTCCAGCAAGTCTGTTGATGCCC
AATTATGTTGTACACCCATCTATTATTCCTACTCCTGGTTACCGAGGCACTCGCTACTATCGCAGCCGAA
ACAGTACCTCCCGCCGTCGCCGCAAGACACCTGCAAATCGCAGTCGTCGCCGTAGACGCACAAGCAAACC
GACTCCCGGCGCCCTGGTGCGGCAAGTGTACCGCAATGGTAGTGCGGAACCTTTGACACTGCCGCGTGCG
CGTTACCATCCGAGTATCATCACTTAATCAATGTTGCCGCTGCCTCCTTGCAGATATGGCCCTCACTTGT
CGCCTTCGCGTTCCCATCACTGGTTACCGAGGAAGAAACTCGCGCCGTAGAAGAGGGATGTTGGGACGCG
GAATGCGACGCTACAGGCGACGGCGTGCTATCCGCAAGCAATTGCGGGGTGGTTTTTTACCAGCCTTAAT
TCCAATTATCGCTGCTGCAATTGGCGCGATACCAGGCATAGCTTCCGTGGCGGTTCAGGCCTCGCAACGA
CATTGACATTGGAAAAAAAACGTATAAATAAAAAAAAATACAATGGACTCTGACACTCCTGGTCCTGTGA
CTATGTTTTCTTAGAGATGGAAGACATCAATTTTTCATCCTTGGCTCCGCGACACGGCACGAAGCCGTAC
ATGGGCACCTGGAGCGACATCGGCACGAGCCAACTGAACGGGGGCGCCTTCAATTGGAGCAGTATCTGGA
GCGGGCTTAAAAATTTTGGCTCAACCATAAAAACATACGGGAACAAAGCTTGGAACAGCAGTACAGGACA
GGCGCTTAGAAATAAACTTAAAGACCAGAACTTCCAACAAAAAGTAGTCGATGGGATAGCTTCCGGCATC
AATGGAGTGGTAGATTTGGCTAACCAGGCTGTGCAGAAAAAGATAAACAGTCGTTTGGACCCGCCGCCAG
CAACCCCAGGTGAAATGCAAGTGGAGGAAGAAATTCCTCCGCCAGAAAAACGAGGCGACAAGCGTCCGCG
TCCCGATTTGGAAGAGACGCTGGTGACGCGCGTAGATGAACCGCCTTCTTATGAGGAAGCAACGAAGCTT
GGAATGCCCACCACTAGACCGATAGCCCCAATGGCCACCGGGGTGATGAAACCTTCTCAGTTGCATCGAC
CCGTCACCTTGGATTTGCCCCCTCCCCCTGCTGCTACTGCTGTACCCGCTTCTAAGCCTGTCGCTGCCCC
GAAACCAGTCGCCGTAGCCAGGTCACGTCCCGGGGGCGCTCCTCGTCCAAATGCGCACTGGCAAAATACT
CTGAACAGCATCGTGGGTCTAGGCGTGCAAAGTGTAAAACGCCGTCGCTGCTTTTAATTAAATATGGAGT
AGCGCTTAACTTGCCTATCTGTGTATATGTGTCATTACACGCCGTCACAGCAGCAGAGGAAAAAAGGAAG
AGGTCGTGCGTCGACGCTGAGTTACTTTCAAGATGGCCACCCCATCGATGCTGCCCCAATGGGCATACAT
GCACATCGCCGGACAGGATGCTTCGGAGTACCTGAGTCCGGGTCTGGTGCAGTTCGCCCGCGCCACAGAC
ACCTACTTCAATCTGGGAAATAAGTTTAGAAATCCCACCGTAGCGCCGACCCACGATGTGACCACCGACC
GTAGCCAGCGGCTCATGTTGCGCTTCGTGCCCGTTGACCGGGAGGACAATACATACTCTTACAAAGTGCG
GTACACCCTGGCCGTGGGCGACAACAGAGTGCTGGATATGGCCAGCACGTTCTTTGACATTAGGGGCGTG
TTGGACAGAGGTCCCAGTTTCAAACCCTATTCTGGTACGGCTTACAACTCTCTGGCTCCTAAAGGCGCTC
CAAATGCATCTCAATGGATTGCAAAAGGCGTACCAACTGCAGCAGCCGCAGGCAATGGTGAAGAAGAACA
TGAAACAGAGGAGAAAACTGCTACTTACACTTTTGCCAATGCTCCTGTAAAAGCCGAGGCTCAAATTACA
AAAGAGGGCTTACCAATAGGTTTGGAGATTTCAGCTGAAAACGAATCTAAACCCATCTATGCAGATAAAC
TTTATCAGCCAGAACCTCAAGTGGGAGATGAAACTTGGACTGACCTAGACGGAAAAACCGAAGAGTATGG
AGGCAGGGCTCTAAAGCCTACTACTAACATGAAACCCTGTTACGGGTCCTATGCGAAGCCTACTAATTTA
AAAGGTGGTCAGGCAAAACCGAAAAACTCGGAACCGTCGAGTGAAAAAATTGAATATGATATTGACATGG
AATTTTTTGATAACTCATCGCAAAGAACAAACTTCAGTCCTAAAATTGTCATGTATGCAGAAAATGTAGG
TTTGGAAACGCCAGACACTCATGTAGTGTACAAACCTGGAACAGAAGACACAAGTTCCGAAGCTAATTTG
GGACAACAGTCTATGCCCAACAGACCCAACTACATTGGCTTCAGAGATAACTTTATTGGACTCATGTACT
ATAACAGTACTGGTAACATGGGGGTGCTGGCTGGTCAAGCGTCTCAGTTAAATGCAGTGGTTGACTTGCA
GGACAGAAACACAGAACTTTCTTACCAACTCTTGCTTGACTCTCTGGGCGACAGAACCAGATACTTTAGC
ATGTGGAATCAGGCTGTGGACAGTTATGATCCTGATGTACGTGTTATTGAAAATCATGGTGTGGAAGATG
AACTTCCCAACTATTGTTTTCCACTGGACGGCATAGGTGTTCCAACAACCAGTTACAAATCAATAGTTCC
AAATGGAGAAGATAATAATAATTGGAAAGAACCTGAAGTAAATGGAACAAGTGAGATCGGACAGGGTAAT
TTGTTTGCCATGGAAATTAACCTTCAAGCCAATCTATGGCGAAGTTTCCTTTATTCCAATGTGGCTCTGT
ATCTCCCAGACTCGTACAAATACACCCCGTCCAATGTCACTCTTCCAGAAAACAAAAACACCTACGACTA
CATGAACGGGCGGGTGGTGCCGCCATCTCTAGTAGACACCTATGTGAACATTGGTGCCAGGTGGTCTCTG
GATGCCATGGACAATGTCAACCCATTCAACCACCACCGTAACGCTGGCTTGCGTTACCGATCTATGCTTC
TGGGTAACGGACGTTATGTGCCTTTCCACATACAAGTGCCTCAAAAATTCTTCGCTGTTAAAAACCTGCT
GCTTCTCCCAGGCTCCTACACTTATGAGTGGAACTTTAGGAAGGATGTGAACATGGTTCTACAGAGTTCC
CTCGGTAACGACCTGCGGGTAGATGGCGCCAGCATCAGTTTCACGAGCATCAACCTCTATGCTACTTTTT
TCCCCATGGCTCACAACACCGCTTCCACCCTTGAAGCCATGCTGCGGAATGACACCAATGATCAGTCATT
CAACGACTACCTATCTGCAGCTAACATGCTCTACCCCATTCCTGCCAATGCAACCAATATTCCCATTTCC
ATTCCTTCTCGCAACTGGGCGGCTTTCAGAGGCTGGTCATTTACCAGACTGAAAACCAAAGAAACTCCCT
CTTTGGGGTCTGGATTTGACCCCTACTTTGTCTATTCTGGTTCTATTCCCTACCTGGATGGTACCTTCTA
CCTGAACCACACTTTTAAGAAGGTTTCCATCATGTTTGACTCTTCAGTGAGCTGGCCTGGAAATGACAGG
TTACTATCTCCTAACGAATTTGAAATAAAGCGCACTGTGGATGGCGAAGGCTACAACGTAGCCCAATGCA
ACATGACCAAAGACTGGTTCTTGGTACAGATGCTCGCCAACTACAACATCGGCTATCAGGGCTTCTACAT
TCCAGAAGGATACAAAGATCGCATGTATTCATTTTTCAGAAACTTCCAGCCCATGAGCAGGCAGGTGGTT
GATGAGGTCAATTACAAAGACTTCAAGGCCGTCGCCATACCCTACCAACACAACAACTCTGGCTTTGTGG
GTTACATGGCTCCGACCATGCGCCAAGGTCAACCCTATCCCGCTAACTATCCCTATCCACTCATTGGAAC
AACTGCCGTAAATAGTGTTACGCAGAAAAAGTTCTTGTGTGACAGAACCATGTGGCGCATACCGTTCTCG
AGCAACTTCATGTCTATGGGGGCCCTTACAGACTTGGGACAGAATATGCTCTATGCCAACTCAGCTCATG
CTCTGGACATGACCTTTGAGGTGGATCCCATGGATGAGCCCACCCTGCTTTATCTTCTCTTCGAAGTTTT
CGACGTGGTCAGAGTGCATCAGCCACACCGCGGCATCATCGAGGCAGTCTACCTGCGTACACCGTTCTCG
GCCGGTAACGCTACCACGTAAGAAGCTTCTTGCTTCTTGCAAATAGCAGCTGCAACCATGGCCTGCGGAT
CCCAAAACGGCTCCAGCGAGCAAGAGCTCAGAGCCATTGTCCAAGACCTGGGTTGCGGACCCTATTTTTT
GGGAACCTACGATAAGCGCTTCCCGGGGTTCATGGCCCCCGATAAGCTCGCCTGTGCCATTGTAAATACG
GCCGGACGTGAGACGGGGGGAGAGCACTGGTTGGCTTTCGGTTGGAACCCACGTTCTAACACCTGCTACC
TTTTTGATCCTTTTGGATTCTCGGATGATCGTCTCAAACAGATTTACCAGTTTGAATATGAGGGTCTCCT
GCGCCGCAGCGCTCTTGCTACCAAGGACCGCTGTATTACGCTGGAAAAATCTACCCAGACCGTGCAGGGC
CCCCGTTCTGCCGCCTGCGGACTTTTCTGCTGCATGTTCCTTCACGCCTTTGTGCACTGGCCTGACCGTC
CCATGGACGGAAACCCCACCATGAAATTGCTAACTGGAGTGCCAAACAACATGCTTCATTCTCCTAAAGT
CCAGCCCACCCTGTGTGACAATCAAAAAGCACTCTACCATTTTCTTAATACCCATTCGCCTTATTTTCGC
TCTCATCGTACACACATCGAAAGGGCCACTGCGTTCGACCGTATGGATGTTCAATAATGACTCATGTAAA
CAACGTGTTCAATAAACATCACTTTATTTTTTTACATGTATCAAGGCTCTGGATTACTTATTTATTTACA
AGTCGAATGGGTTCTGACGAGAATCAGAATGACCCGCAGGCAGTGATACGTTGCGGAACTGATACTTGGG
TTGCCACTTGAATTCGGGAATCACCAACTTGGGAACCGGTATATCGGGCAGGATGTCACTCCACAGCTTT
CTGGTCAGCTGCAAAGCTCCAAGCAGGTCAGGAGCCGAAATCTTGAAATCACAATTAGGACCAGTGCTCT
GAGCGCGAGAGTTGCGGTACACCGGATTGCAGCACTGAAACACCATCAGCGACGGATGTCTCACGCTTGC
CAGCACGGTGGGATCTGCAATCATGCCCACATCCAGATCTTCAGCATTGGCAATGCTGAACGGGGTCATC
TTGCAGGTCTGCCTACCCATGGCGGGCACCCAATTAGGCTTGTGGTTGCAATCGCAGTGCAGGGGGATCA
GTATCATCTTGGCCTGATCCTGTCTGATTCCTGGATACACGGCTCTCATGAAAGCATCATATTGCTTGAA
AGCCTGCTGGGCTTTACTACCCTCGGTATAAAACATCCCGCAGGACCTGCTCGAAAACTGGTTAGCTGCA
CAGCCGGCATCATTCACACAGCAGCGGGCGTCATTGTTGGCTATTTGCACCACACTTCTGCCCCAGCGGT
TTTGGGTGATTTTGGTTCGCTCGGGATTCTCCTTTAAGGCTCGTTGTCCGTTCTCGCTGGCCACATCCAT
CTCGATAATCTGCTCCTTCTGAATCATAATATTGCCATGCAGGCACTTCAGCTTGCCCTCATAATCATTG
CAGCCATGAGGCCACAACGCACAGCCTGTACATTCCCAATTATGGTGGGCGATCTGAGAAAAAGAATGTA
TCATTCCCTGCAGAAATCTTCCCATCATCGTGCTCAGTGTCTTGTGACTAGTGAAAGTTAACTGGATGCC
TCGGTGCTCTTCGTTTACGTACTGGTGACAGATGCGCTTGTATTGTTCGTGTTGCTCAGGCATTAGTTTA
AAACAGGTTCTAAGTTCGTTATCCAGCCTGTACTTCTCCATCAGCAGACACATCACTTCCATGCCTTTCT
CCCAAGCAGACACCAGGGGCAAGCTAATCGGATTCTTAACAGTGCAGGCAGCAGCTCCTTTAGCCAGAGG
GTCATCTTTAGCGATCTTCTCAATGCTTCTTTTGCCATCCTTCTCAACGATGCGCACGGGCGGGTAGCTG
AAACCCACTGCTACAAGTTGCGCCTCTTCTCTTTCTTCTTCGCTGTCTTGACTGATGTCTTGCATGGGGA
TATGTTTGGTCTTCCTTGGCTTCTTTTTGGGGGGTATCGGAGGAGGAGGACTGTCGCTCCGTTCCGGAGA
CAGGGAGGATTGTGACGTTTCGCTCACCATTACCAACTGACTGTCGGTAGAAGAACCTGACCCCACACGG
CGACAGGTGTTTTTCTTCGGGGGCAGAGGTGGAGGCGATTGCGAAGGGCTGCGGTCCGACCTGGAAGGCG
GATGACTGGCAGAACCCCTTCCGCGTTCGGGGGTGTGCTCCCTGTGGCGGTCGCTTAACTGATTTCCTTC
GCGGCTGGCCATTGTGTTCTCCTAGGCAGAGAAACAACAGACATGGAAACTCAGCCATTGCTGTCAACAT
CGCCACGAGTGCCATCACATCTCGTCCTCAGCGACGAGGAAAAGGAGCAGAGCTTAAGCATTCCACCGCC
CAGTCCTGCCACCACCTCTACCCTAGAAGATAAGGAGGTCGACGCATCTCATGACATGCAGAATAAAAAA
GCGAAAGAGTCTGAGACAGACATCGAGCAAGACCCGGGCTATGTGACACCGGTGGAACACGAGGAAGAGT
TGAAACGCTTTCTAGAGAGAGAGGATGAAAACTGCCCAAAACAGCGAGCAGATAACTATCACCAAGATGC
TGGAAATAGGGATCAGAACACCGACTACCTCATAGGGCTTGACGGGGAAGACGCGCTCCTTAAACATCTA
GCAAGACAGTCGCTCATAGTCAAGGATGCATTATTGGACAGAACTGAAGTGCCCATCAGTGTGGAAGAGC
TCAGCTGCGCCTACGAGCTTAACCTTTTTTCACCTCGTACTCCCCCCAAACGTCAGCCAAACGGCACCTG
CGAGCCAAATCCTCGCTTAAACTTTTATCCAGCTTTTGCTGTGCCAGAAGTACTGGCTACCTATCACATC
TTTTTTAAAAATCAAAAAATTCCAGTCTCCTGCCGCGCTAATCGCACCCGCGCCGATGCCCTACTCAATC
TGGGACCTGGTTCACGCTTACCTGATATAGCTTCCTTGGAAGAGGTTCCAAAGATCTTCGAGGGTCTGGG
CAATAATGAGACTCGGGCCGCAAATGCTCTGCAAAAGGGAGAAAATGGCATGGATGAGCATCACAGCGTT
CTGGTGGAATTGGAAGGCGATAATGCCAGACTCGCAGTACTCAAGCGAAGCGTCGAGGTCACACACTTCG
CATATCCCGCTGTCAACCTGCCCCCTAAAGTCATGACGGCGGTCATGGACCAGTTACTCATTAAGCGCGC
AAGTCCCCTTTCAGAAGACATGCATGACCCAGATGCCTGTGATGAGGGTAAACCAGTGGTCAGTGATGAG
CAGCTAACCCGATGGCTGGGCACCGACTCTCCCCGGGATTTGGAAGAGCGTCGCAAGCTTATGATGGCCG
TGGTGCTGGTTACCGTAGAACTAGAGTGTCTCCGACGTTTCTTTACCGATTCAGAAACCTTGCGCAAACT
CGAAGAGAATCTGCACTACACTTTTAGACACGGCTTTGTGCGGCAGGCATGCAAGATATCTAACGTGGAA
CTCACCAACCTGGTTTCCTACATGGGTATTCTGCATGAGAATCGCCTAGGACAAAGCGTGCTGCACAGCA
CCCTTAAGGGGGAAGCCCGCCGTGATTACATCCGCGATTGTGTCTATCTCTACCTGTGCCACACGTGGCA
AACCGGCATGGGTGTATGGCAGCAATGTTTAGAAGAACAGAACTTGAAAGAGCTTGACAAGCTCTTACAG
AAATCTCTTAAGGTTCTGTGGACAGGGTTCGACGAGCGCACCGTCGCTTCCGACCTGGCAGACCTCATCT
TCCCAGAGCGTCTCAGGGTTACTTTGCGAAACGGATTGCCTGACTTTATGAGCCAGAGCATGCTTAACAA
TTTTCGCTCTTTCATCCTGGAACGCTCCGGTATCCTGCCCGCCACCTGCTGCGCACTGCCCTCCGACTTT
GTGCCTCTCACCTACCGCGAGTGCCCCCCGCCGCTATGGAGTCACTGCTACCTGTTCCGTCTGGCCAACT
ATCTCTCCTACCACTCGGATGTGATCGAGGATGTGAGCGGAGACGGCTTGCTGGAGTGCCACTGCCGCTG
CAATCTGTGCACGCCCCACCGGTCCCTAGCTTGCAACCCCCAGTTGATGAGCGAAACCCAGATAATAGGC
ACCTTTGAATTGCAAGGCCCCAGCAGCCAAGGCGATGGGTCTTCTCCTGGGCAAAGTTTAAAACTGACCC
CGGGACTGTGGACCTCCGCCTACTTGCGCAAGTTTGCTCCGGAAGATTACCACCCCTATGAAATCAAGTT
CTATGAGGACCAATCACAGCCTCCAAAGGCCGAACTTTCGGCTTGCGTCATCACCCAGGGGGCAATTCTG
GCCCAATTGCAAGCCATCCAAAAATCCCGCCAAGAATTTCTACTGAAAAAGGGTAAGGGGGTCTACCTTG
ACCCCCAGACCGGCGAGGAACTCAACACAAGGTTCCCTCAGGATGTCCCAACGACGAGAAAACAAGAAGT
TGAAGGTGCAGCCGCCGCCCCCAGAAGATATGGAGGAAGATTGGGACAGTCAGGCAGAGGAGGCGGAGGA
GGACAGTCTGGAGGACAGTCTGGAGGAAGACAGTTTGGAGGAGGAAAACGAGGAGGCAGAGGAGGTGGAA
GAAGTAACCGCCGACAAACAGTTATCCTCGGCTGCGGAGACAAGCAACAGCGCTACCATCTCCGCTCCGA
GTCGAGGAACCCGGCGGCGTCCCAGCAGTAGATGGGACGAGACCGGACGCTTCCCGAACCCAACCAGCGC
TTCCAAGACCGGTAAGAAGGATCGGCAGGGATACAAGTCCTGGCGGGGGCATAAGAATGCCATCATCTCC
TGCTTGCATGAGTGCGGGGGCAACATATCCTTCACGCGGCGCTACTTGCTATTCCACCATGGGGTGAACT
TTCCGCGCAATGTTTTGCATTACTACCGTCACCTCCACAGCCCCTACTATAGCCAGCAAATCCCGACAGT
CTCGACAGATAAAGACAGCGGCGGCGACCTCCAACAGAAAACCAGCAGCGGCAGTTAGAAAATACACAAC
AAGTGCAGCAACAGGAGGATTAAAGATTACAGCCAACGAGCCAGCGCAAACCCGAGAGTTAAGAAATCGG
ATCTTTCCAACCCTGTATGCCATCTTCCAGCAGAGTCGGGGTCAAGAGCAGGAACTGAAAATAAAAAACC
GATCTCTGCGTTCGCTCACCAGAAGTTGTTTGTATCACAAGAGCGAAGATCAACTTCAGCGCACTCTCGA
GGACGCCGAGGCTCTCTTCAACAAGTACTGCGCGCTGACTCTTAAAGAGTAGGCAGCGACCGCGCTTATT
CAAAAAAGGCGGGAATTACATCATCCTCGACATGAGTAAAGAAATTCCCACGCCTTACATGTGGAGTTAT
CAACCCCAAATGGGATTGGCAGCAGGCGCCTCCCAGGACTACTCCACCCGCATGAATTGGCTCAGCGCCG
GGCCTTCTATGATTTCTCGAGTTAATGATATACGCGCCTACCGAAACCAAATACTTTTGGAACAGTCAGC
TCTTACCACCACGCCCCGCCAACACCTTAATCCCAGAAATTGGCCCGCCGCCCTAGTGTACCAGGAAAGT
CCCGCTCCCACCACTGTATTACTTCCTCGAGACGCCCAGGCCGAAGTCCAAATGACTAATGCAGGTGCGC
AGTTAGCTGGCGGCTCCACCCTATGTCGTCACAGGCCTCGGCATAATATAAAACGCCTGATGATCAGAGG
CCGAGGTATCCAGCTCAACGACGAGTCGGTGAGCTCTCCGCTTGGTCTACGACCAGACGGAATCTTTCAG
ATTGCCGGCTGCGGGAGATCTTCCTTCACCCCTCGTCAGGCTGTTCTGACTTTGGAAAGTTCGTCTTCGC
AACCCCGCTCGGGCGGAATCGGGACCGTTCAATTTGTAGAGGAGTTTACTCCCTCTGTCTACTTCAACCC
CTTCTCCGGATCTCCTGGGCACTACCCGGACGAGTTCATACCGAACTTCGACGCGATTAGCGAGTCAGTG
GACGGCTACGATTGATGTCTGGTGACGCGGCTGAGCTATCTCGGCTGCGACATCTAGACCACTGCCGCCG
CTTTCGCTGCTTTGCCCGGGAACTTATTGAGTTCATCTACTTCGAACTCCCCAAGGATCACCCTCAAGGT
CCGGCCCACGGAGTGCGGATTACTATCGAAGGCAAAATAGACTCTCGCCTGCAACGAATTTTCTCCCAGC
GGCCCGTGCTGATCGAGCGAGACCAGGGAAACACCACGGTTAGTAATCAATTACGGGGTCATTAGTTCAT
AGCCCATATATGGAGTTAACTTGTTTATTGCAGCTTATAATGGTTACAAATAAAGCAATAGCATCACAAA
TTTCACAAATAAAGCATTTTTTTCACTGCATTCTAGTTGTGGTTTGTCCAAACTCATCAATGTATCTTAT
CATGTCTGCTCGAAGCGGCCGGCCGCCCCGACTCTAGAGTCGCGGCCTCATTAGGAAGTTCCTATACTTT
CTAGAGAATAGGAACTTCTCAGAAGAACTCGTCAAGAAGGCGATAGAAGGCGATGCGCTGCGAATCGGGA
GCGGCGATACCGTAAAGCACGAGGAAGCGGTCAGCCCATTCGCCGCCAAGCTCTTCAGCAATATCACGGG
TAGCCAACGCTATGTCCTGATAGCGGTCCGCCACACCCAGCCGGCCACAGTCGATGAATCCAGAAAAGCG
GCCATTTTCCACCATGATATTCGGCAAGCAGGCATCGCCATGGGTCACGACGAGATCCTCGCCGTCGGGC
ATGCGCGCCTTGAGCCTGGCGAACAGTTCGGCTGGCGCGAGCCCCTGATGCTCTTCGTCCAGATCATCCT
GATCGACAAGACCGGCTTCCATCCGAGTACGTGCTCGCTCGATGCGATGTTTCGCTTGGTGGTCGAATGG
GCAGGTAGCCGGATCAAGCGTATGCAGCCGCCGCATTGCATCAGCCATGATGGATACTTTCTCGGCAGGA
GCAAGGTGAGATGACAGGAGATCCTGCCCCGGCACTTCGCCCAATAGCAGCCAGTCCCTTCCCGCTTCAG
TGACAACGTCGAGCACAGCTGCGCAAGGAACGCCCGTCGTGGCCAGCCACGATAGCCGCGCTGCCTCGTC
CTGCAGTTCATTCAGGGCACCGGACAGGTCGGTCTTGACAAAAAGAACCGGGCGCCCCTGCGCTGACAGC
CGGAACACGGCGGCATCAGAGCAGCCGATTGCCTGTTGTGCCCAGTCATAGCCGAATAGCCTCTCCACCC
AAGCGGCCGGAGAACCTGCGTGCAATCCATCTTGTTCAATGGCCGATCCCATAACACCCCTTGTATTACT
GTTTATGTAAGCAGACAGTTTTACTGTTCGTGATGATATATTTTTATCTTGTGCAATGTAACAGGTTGTG
GCCATAGCGGGCCCGGGATTTTCCTCCACGTCCCCGCATGTTAGAAGACTTCCCCTGCCCTCGGCTCTGG
AAGTTCCTATACTTTCTAGAGAATAGGAACTTCCCGCCAGAATGCGTTCGCACAGCCGCCAGCCGGTCAC
TCCGTTGATGGTTACTCGGAACAGCAGGGAGCCGTCGGGGTTGATCAGGCGCTCGTCGATAATTTTGTTG
CCGTTCCACAGGGTCCCTGTTACAGTGATCTTTTTGCCGTCGAACACGGCGATGCCTTCATACGGCCGTC
CGAAATAGTCGATCATGTTCGGCGTAACCCCGTCGATTACCAGTGTGCCATAGTGCAGGATCACCTTAAA
GTGATGATCATCCACAGGGTACACCACCTTAAAAATTTTTTCGATCTGGCCCATTTGGTCGCCGCTCAGA
CCTTCATACGGGATGATGACATGGATGTCGATCTTCAGCCCATTTTCACCGCTCAGGACAATCCTTTGGA
TCGGAGTTACGGACACCCCGAGATTCTGAAACAAACTGGACACACCTCCCTGTTCAAGGACTTGGTCCAG
GTTGTAGCCGGCTGTCTGTCGCCAGTCCCCAACGAAATCTTCGAGTGTGAAGACCATGGATCCGGGCCCG
GGGTTTTCTTCAACGTCTCCAGCCTGCTTCAGCAGGCTGAAGTTAGTAGCTCCGCTTCCTCGAGCTCGAG
ATCTGGCGAAGGCGATGGGGGTCTTGAAGGCGTGCTGGTACTCCACGATGCCCAGCTCGGTGTTGCTGTG
CAGCTCCTCCACGCGGCGGAAGGCGAACATGGGGCCCCCGTTCTGCAGGATGCTGGGGTGGATGGCGCTC
TTGAAGTGCATGTGGCTGTCCACCACGAAGCTGTAGTAGCCGCCGTCGCGCAGGCTGAAGGTGCGGGCGA
AGCTGCCCACCAGCACGTTATCGCCCATGGGGTGCAGGTGCTCCACGGTGGCGTTGCTGCGGATGATCTT
GTCGGTGAAGATCACGCTGTCCTCGGGGAAGCCGGTGCCCACCACCTTGAAGTCGCCGATCACGCGGCCG
GCCTCGTAGCGGTAGCTGAAGCTCACGTGCAGCACGCCGCCGTCCTCGTACTTCTCGATGCGGGTGTTGG
TGTAGCCGCCGTTGTTGATGGCGTGCAGGAAGGGGTTCTCGTAGCCGCTGGGGTAGGTGCCGAAGTGGTA
GAAGCCGTAGCCCATCACGTGGCTCAGCAGGTAGGGGCTGAAGGTCAGGGCGCCTTTGGTGCTCTTCATC
TTGTTGGTCATGCGGCCCTGCTCGGGGGTGCCCTCTCCGCCGCCCACCAGCTCGAACTCCACGCCGTTCA
GGGTGCCGGTGATGCGGCACTCGATCTTCATGGCGGGCATGGTGGCGACCGGTAGCGCTAGCGGCTTCGG
TACCACGCGTTCGCTCGAATTAATCAATTCTTTGCCAAAATGATGAGACAGCACAATAACCAGCACGTTG
CCCAGGAGCTGTAGGAAAAAGAAGAAGGCATGAACATGGTTAGCAGAGGCTCTAGAGCCGCCGGTCACAC
GCCAGAAGCCGAACCCCGCCCTGCCCCGTCCCCCCCGAAGGCAGCCGTCCCCCCGCGGACAGCCCCGAGG
CTGGAGAGGGAGAAGGGGACGGCGGCGCGGCGACGCACGAAGGCCCTCCCCGCCCATTTCCTTCCTGCCG
GGGCCCTCCCGGAGCCCCTCAAGGCTTTCACGCAGCCACAGAAAAGAAACAAGCCGTCATTAAACCAAGC
GCTAATTACAGCCCGGAGGAGAAGGGCCGTCCCGCCCGCTCACCTGTGGGAGTAACGCGGTCAGTCAGAG
CCGGGGCGGGCGGCGCGAGGCGGCGCGGAGCGGGGCACGGGGCGAAGGCAACGCAGCGACTCCCGCCCGC
CGCGCGCTTCGCTTTTTATAGGGCCGCCGCCGCCGCCGCCTCGCCATAAAAGGAAACTTTCGGAGCGCGC
CGCTCTGATTGGCTGCCGCCGCACCTCTCCGCCTCGCCCCGCCCCGCCCCTCGCCCCGCCCCGCCCCGCC
TGGCGCGCGCCCCCCCCCCCCCCCCGCCCCCATCGCTGCACAAAATAATTAAAAAATAAATAAATACAAA
ATTGGGGGTGGGGAGGGGGGGGAGATGGGGAGAGTGAAGCAGAACGTGGGGCTCACCTCGACCATGGTAA
TAGCGATGACTAATACGTAGATGTACTGCCAAGTAGGAAAGTCCCATAAGGTCATGTACTGGGCATAATG
CCAGGCGGGCCATTTACCGTCATTGACGTCAATAGGGGGCGTACTTGGCATATGATACACTTGATGTACT
GCCAAGTGGGCAGTTTACCGTAAATACTCCACCCATTGACGTCAATGGAAAGTCCCTATTGGCGTTACTA
TGGGAACATACGTCATTATTGACGTCAATGGGCGGGGGTCGTTGGGCGGTCAGCCAGGCGGGCCATTTAC
CGTAAGTTATGTAACGCGGAACAACAACAATTGCATTCATTTTATGTTTCAGGTTCAGGGGGAGGTGTGG
TCCTGCGATTCCATCGAGTGCACCTACACCCTGCTGAAGACCCTATGCGGCCTAAGAGACCTGCTACCAA
TGAATTAAAAAAAAATGATTAATAAAAAATCACTTACTTGAAATCAGCAATAAGGTCTCTGTTGAAATTT
TCTCCCAGCAGCACCTCACTTCCCTCTTCCCAACTCTGGTATTCTAAACCCCGTTCAGCGGCATACTTTC
TCCATACTTTAAAGGGGATGTCAAATTTTAGCTCCTCTCCTGTACCCACAATCTTCATGTCTTTCTTCCC
AGATGACCAAGAGAGTCCGGCTCAGTGACTCCTTCAACCCTGTCTACCCCTATGAAGATGAAAGCACCTC
CCAACACCCCTTTATAAACCCAGGGTTTATTTCCCCAAATGGCTTCACACAAAGCCCAGACGGAGTTCTT
ACTTTAAAATGTTTAACCCCACTAACAACCACAGGCGGATCTCTACAGCTAAAAGTGGGAGGGGGACTTA
CAGTGGATGACACTGATGGTACCTTACAAGAAAACATACGTGCTACAGCACCCATTACTAAAAATAATCA
CTCTGTAGAACTATCCATTGGAAATGGATTAGAAACTCAAAACAATAAACTATGTGCCAAATTGGGAAAT
GGGTTAAAATTTAACAACGGTGACATTTGTATAAAGGATAGTATTAACACCTTATGGACTGGAATAAACC
CTCCACCTAACTGTCAAATTGTGGAAAACACTAATACAAATGATGGCAAACTTACTTTAGTATTAGTAAA
AAATGGAGGGCTTGTTAATGGCTACGTGTCTCTAGTTGGTGTATCAGACACTGTGAACCAAATGTTCACA
CAAAAGACAGCAAACATCCAATTAAGATTATATTTTGACTCTTCTGGAAATCTATTAACTGAGGAATCAG
ACTTAAAAATTCCACTTAAAAATAAATCTTCTACAGCGACCAGTGAAACTGTAGCCAGCAGCAAAGCCTT
TATGCCAAGTACTACAGCTTATCCCTTCAACACCACTACTAGGGATAGTGAAAACTACATTCATGGAATA
TGTTACTACATGACTAGTTATGATAGAAGTCTATTTCCCTTGAACATTTCTATAATGCTAAACAGCCGTA
TGATTTCTTCCAATGTTGCCTATGCCATACAATTTGAATGGAATCTAAATGCAAGTGAATCTCCAGAAAG
CAACATAGCTACGCTGACCACATCCCCCTTTTTCTTTTCTTACATTACAGAAGACGACAACTAAAATAAA
GTTTAAGTGTTTTTATTTAAAATCACAAAATTCGAGTAGTTATTTTGCCTCCACCTTCCCATTTGACAGA
ATACACAGTCCTTTCTCCCCGGCTGGCCTTAAAAAGCATCATATCATGGGTAACAGACATATTCTTAGGT
GTTATATTCCACACGGTTTCCTGTCGAGCCAAACGCTCATCAGTGATATTAATAAACTCCCCGGGCAGCT
CACTTAAGTTCATGTCGCTGTCCAGCTGCTGAGCCACAGGCTGCTGTCCAACTTGCGGTTGCTTAACGGG
CGGCGAAGGAGAAGTCCACGCCTACATGGGGGTAGAGTCATAATCGTGCATCAGGATAGGGCGGTGGTGC
TGCAGCAGCGCGCGAATAAACTGCTGCCGCCGCCGCTCCGTCCTGCAGGAATACAACATGGCAGTGGTCT
CCTCAGCGATGATTCGCACCGCCCGCAGCATAAGGCGCCTTGTCCTCCGGGCACAGCAGCGCACCCTGAT
CTCACTTAAATCAGCACAGTAACTGCAGCACAGCACCACAATATTGTTCAAAATCCCACAGTGCAAGGCG
CTGTATCCAAAGCTCATGGCGGGGACCACAGAACCCACGTGGCCATCATACCACAAGCGCAGGTAGATTA
AGTGGCGACCCCTCATAAACACGCTGGACATAAACATTACCTCTTTTGGCATGTTGTAATTCACCACCTC
CCGGTACCATATAAACCTCTGATTAAACATGGCGCCATCCACCACCATCCTAAACCAGCTGGCCAAAACC
TGCCCGCCGGCTATACACTGCAGGGAACCGGGACTGGAACAATGACAGTGGAGAGCCCAGGACTCGTAAC
CATGGATCATCATGCTCGTCATGATATCAATGTTGGCACAACACAGGCACACGTGCATACACTTCCTCAG
GATTACAAGCTCCTCCCGCGTTAGAACCATATCCCAGGGAACAACCCATTCCTGAATCAGCGTAAATCCC
ACACTGCAGGGAAGACCTCGCACGTAACTCACGTTGTGCATTGTCAAAGTGTTACATTCGGGCAGCAGCG
GATGATCCTCCAGTATGGTAGCGCGGGTTTCTGTCTCAAAAGGAGGTAGACGATCCCTACTGTACGGAGT
GCGCCGAGACAACCGAGATCGTGTTGGTCGTAGTGTCATGCCAAATGGAACGCCGGACGTAGTCATTCTC
GTATTTTGTATAGCAAAACGCGGCCCTGGCAGAACACACTCTTCTTCGCCTTCTATCCTGCCGCTTAGCG
TGTTCCGTGTGATAGTTCAAGTACAGCCACACTCTTAAGTTGGTCAAAAGAATGCTGGCTTCAGTTGTAA
TCAAAACTCCATCGCATCTAATTGTTCTGAGGAAATCATCCACGGTAGCATATGCAAATCCCAACCAAGC
AATGCAACTGGATTGCGTTTCAAGCAGGAGAGGAGAGGGAAGAGACGGAAGAACCATGTTAATTTTTATT
CCAAACGATCTCGCAGTACTTCAAATTGTAGATCGCGCAGATGGCATCTCTCGCCCCCACTGTGTTGGTG
AAAAAGCACAGCTAAATCAAAAGAAATGCGATTTTCAAGGTGCTCAACGGTGGCTTCCAACAAAGCCTCC
ACGCGCACATCCAAGAACAAAAGAATACCAAAAGAAGGAGCATTTTCTAACTCCTCAATCATCATATTAC
ATTCCTGCACCATTCCCAGATAATTTTCAGCTTTCCAGCCTTGAATTATTCGTGTCAGTTCTTGTGGTAA
ATCCAATCCACACATTACAAACAGGTCCCGGAGGGCGCCCTCCACCACCATTCTTAAACACACCCTCATA
ATGACAAAATATCTTGCTCCTGTGTCACCTGTAGCGAATTGAGAATGGCAACATCAATTGACATGCCCTT
GGCTCTAAGTTCTTCTTTAAGTTCTAGTTGTAAAAACTCTCTCATATTATCACCAAACTGCTTAGCCAGA
AGCCCCCCGGGAACAAGAGCAGGGGACGCTACAGTGCAGTACAAGCGCAGACCTCCCCAATTGGCTCCAG
CAAAAACAAGATTGGAATAAGCATATTGGGAACCACCAGTAATATCATCGAAGTTGCTGGAAATATAATC
AGGCAGAGTTTCTTGTAGAAATTGAATAAAAGAAAAATTTGCCAAAAAAACATTCAAAACCTCTGGGATG
CAAATGCAATAGGTTACCGCGCTGCGCTCCAACATTGTTAGTTTTGAATTAGTCTGCAAAAATAAAAAAA
AAACAAGCGTCATATCATAGTAGCCTGACGAACAGGTGGATAAATCAGTCTTTCCATCACAAGACAAGCC
ACAGGGTCTCCAGCTCGACCCTCGTAAAACCTGTCATCGTGATTAAACAACAGCACCGAAAGTTCCTCGC
GGTGACCAGCATGAATAAGTCTTGATGAAGCATACAATCCAGACATGTTAGCATCAGTTAAGGAGAAAAA
ACAGCCAACATAGCCTTTGGGTATAATTATGCTTAATCGTAAGTATAGCAAAGCCACCCCTCGCGGATAC
AAAGTAAAAGGCACAGGAGAATAAAAAATATAATTATTTCTCTGCTGCTGTTTAGGCAACGTCGCCCCCG
GTCCCTCTAAATACACATACAAAGCCTCATCAGCCATGGCTTACCAGAGAAAGTACAGCGGGCACACAAA
CCACAAGCTCTAAAGTCACTCTCCAACCTCTCCACAATATATATACACAAGCCCTAAACTGACGTAATGG
GACTAAAGTGTAAAAAATCCCGCCAAACCCAACACACACCCCGAAACTGCGTCACCAGGGAAAAGTACAG
TTTCACTTCCGCAATCCCAACAAGCGTCACTTCCTCTTTCTCACGGTACGTCACATCCCATTAACTTACA
ACGTCATTTTCCCACGGCCGCGCCGCCCCTTTTAACCGTTAACCCCACAGCCAATCACCACACGGCCCAC
ACTTTTTAAAATCACCTCATTTACATATTGGCACCATTCCATCTATAAGGTATATTATTGATGATGGCCA
AGCTATTTAGGTGACACTATAGAATACTCAAGCTATGCATCAAGCTTGGTACCGAGCTCGGATCCACTAG
TAACGGCCGCCAGTGTGCTGGAATTCGCCCTTGTTTAAACGCGATCGCTTGAGATCGTTTTGGTCTGCGC
GTAATCTCTTGCTCTGAAAACGAAAAAACCGCCTTGCAGGGCGGTTTTTCGAAGGTTCTCTGAGCTACCA
ACTCTTTGAACCGAGGTAACTGGCTTGGAGGAGCGCAGTCACCAAAACTTGTCCTTTCAGTTTAGCCTTA
ACCGGCGCATGACTTCAAGACTAACTCCTCTAAATCAATTACCAGTGGCTGCTGCCAGTGGTGCTTTTGC
ATGTCTTTCCGGGTTGGACTCAAGACGATAGTTACCGGATAAGGCGCAGCGGTCGGACTGAACGGGGGGT
TCGTGCATACAGTCCAGCTTGGAGCGAACTGCCTACCCGGAACTGAGTGTCAGGCGTGGAATGAGACAAA
CGCGGCCATAACAGCGGAATGACACCGGTAAACCGAAAGGCAGGAACAGGAGAGCGCACGAGGGAGCCGC
CAGGGGGAAACGCCTGGTATCTTTATAGTCCTGTCGGGTTTCGCCACCACTGATTTGAGCGTCAGATTTC
GTGATGCTTGTCAGGGGGGCGGAGCCTATGGAAAAACGGCTTTGCCGCGGCCCTCTCACTTCCCTGTTAA
GTATCTTCCTGGCATCTTCCAGGAAATCTCCGCCCCGTTCGTAAGCCATTTCCGCTCGCCGCAGTCGAAC
GACCGAGCGTAGCGAGTCAGTGAGCGAGGAAGCGGAATATATCCTGTATCACATATTCTGCTGACGCACC
GGTGCAGCCTTTTTTCTCCTGCCACATGAAGCACTTCACTGACACCCTCATCAGTGCCAACATAGTAAGC
CAGTATACACTCCGCTAGCGCGATCGCTTAATTAATTTAAATCCTGCAGGGTTTAAACGGCCGGCCTAGG
GATAACAGGGTAATCGTAACTATAACGGTCCTAAGGTAGCGAATGATGTCCGGCGGTGCTTTTGCCGTTA
CGCACCACCCCGTCAGTAGCTGAACAGGAGGGACAGCTGATAGAAACAGAAGCCACTGGAGCACCTCAAA
AACACCATCATACACTAAATCAGTAAGTTGGCAGCATCACCCGACGCACTTTGCGCCGAATAAATACCTG
TGACGGAAGATCACTTCGCAGAATAAATAAATCCTGGTGTCCCTGTTGATACCGGGAAGCCCTGGGCCAA
CTTTTGGCGAAAATGAGACGTTGATCGGCACGTAAGAGGTTCCAACTTTCACCATAATGAAATAAGATCA
CTACCGGGCGTATTTTTTGAGTTATCGAGATTTTCAGGAGCTAAGGAAGCTAAAATGGAGAAAAAAATCA
CTGGATATACCACCGTTGATATATCCCAATGGCATCGTAAAGAACATTTTGAGGCATTTCAGTCAGTTGC
TCAATGTACCTATAACCAGACCGTTCAGCTGGATATTACGGCCTTTTTAAAGACCGTAAAGAAAAATAAG
CACAAGTTTTATCCGGCCTTTATTCACATTCTTGCCCGCCTGATGAATGCTCATCCGGAATTCCGTATGG
CAATGAAAGACGGTGAGCTGGTGATATGGGATAGTGTTCACCCTTGTTACACCGTTTTCCATGAGCAAAC
TGAAACGTTTTCATCGCTCTGGAGTGAATACCACGACGATTTCCGGCAGTTTCTACACATATATTCGCAA
GATGTGGCGTGTTACGGTGAAAACCTGGCCTATTTCCCTAAAGGGTTTATTGAGAATATGTTTTTCGTCT
CAGCCAATCCCTGGGTGAGTTTCACCAGTTTTGATTTAAACGTGGCCAATATGGACAACTTCTTCGCCCC
CGTTTTCACCATGGGCAAATATTATACGCAAGGCGACAAGGTGCTGATGCCGCTGGCGATTCAGGTTCAT
CATGCCGTCTGTGATGGCTTCCATGTCGGCAGAATGCTTAATGAATTACAACAGTACTGCGATGAGTGGC
AGGGCGGGGCGTAACCTGCAGGTTAATTAAGGAAGGGCGAATTCTGCAGATATCCATCACACTGGCGGCC
GCTCGAGCATGCATCTAGAGGGCCCAATTCGCCCTATAGTGAGTCGTATTACAATTCACTGGCC (SEQ
ID NO: 176)
The nucleotide sequence of PS3:
CATCATCAATAATATACCTTATAGATGGAATGGTGCCAATATGTAAATGAGGTGATTTTAAAAAGTGTGG
GCCGTGTGGTGATTGGCTGTGGGGTTAACGGTTAAAAGGGGCGGCGCGGCCGTGGGAAAATGACGTTTTA
TGGGGGTGGAGTTTATAACTTCGTATAGCATACATTATACGAAGTTATTTTTGCAAGTTGTCGCGGGAAA
TGTTACGCATAAAAAGGCTTCTTTTCTCACGGAACTACTTAGTTTTCCCACGGTATTTAACAGGAAATGA
GGTAGTTTTGACCGGATGCAAGTGAAAATTGCTGATTTTCGCGCGAAAACTGAATGAGGAAGTGTTTTTC
TGAATAATGTGGTATTTATGGCAGGGTGGAGTATTTGTTCAGGGCCAGGTAGACTTTGACCCATTACGTG
GAGGTTTCGATTACCGTGTTTTTTACCTGAATTTCCGCGTACCGTGTCAAAGTCTTCTGTTTTTACGTAG
GTGTCAGCTGATCGCTAGGGTATTTATAACTTCGTATAGCATACATTATACGAAGTTATGGAATGTTTAT
GCCTTACCAGTGTAACATGAATCATGTGAAAGTGTTGTTGGAACCAGATGCCTTTTCCAGAATGAGCCTA
ACAGGAATCTTTGACATGAACACGCAAATCTGGAAGATCCTGAGGTATGATGATACGAGATCGAGGGTGC
GCGCATGCGAATGCGGAGGCAAGCATGCCAGGTTCCAGCCGGTGTGTGTAGATGTGACCGAAGATCTCAG
ACCGGATCATTTGGTTATTGCCCGCACTGGAGCAGAGTTCGGATCCAGTGGAGAAGAAACTGACTAAGGT
GAGTATTGGGAAAACTTTGGGGTGGGATTTTCAGATGGACAGATTGAGTAAAAATTTGTTTTTTCTGTCT
TGCAGCTGACATGAGTGGAAATGCTTCTTTTAAGGGGGGAGTCTTCAGCCCTTATCTGACAGGGCGTCTC
CCATCCTGGGCAGGAGTTCGTCAGAATGTTATGGGATCTACTGTGGATGGAAGACCCGTTCAACCCGCCA
ATTCTTCAACGCTGACCTATGCTACTTTAAGTTCTTCACCTTTGGACGCAGCTGCAGCCGCTGCCGCCGC
CTCTGTCGCCGCTAACACTGTGCTTGGAATGGGTTACTATGGAAGCATCGTGGCTAATTCCACTTCCTCT
AATAACCCTTCTACACTGACTCAGGACAAGTTACTTGTCCTTTTGGCCCAGCTGGAGGCTTTGACCCAAC
GTCTGGGTGAACTTTCTCAGCAGGTGGCCGAGTTGCGAGTACAAACTGAGTCTGCTGTCGGCACGGCAAA
GTCTAAATAAAAAAAATTCCAGAATCAATGAATAAATAAACGAGCTTGTTGTTGATTTAAAATCAAGTGT
TTTTATTTCATTTTTCGCGCACGGTATGCCCTGGACCACCGATCTCGATCATTGAGAACTCGGTGGATTT
TTTCCAGAATCCTATAGAGGTGGGATTGAATGTTTAGATACATGGGCATTAGGCCGTCTTTGGGGTGGAG
ATAGCTCCATTGAAGGGATTCATGCTCCGGGGTAGTGTTGTAAATCACCCAGTCATAACAAGGTCGCAGT
GCATGGTGTTGCACAATATCTTTTAGAAGTAGGCTGATTGCCACAGATAAGCCCTTGGTGTAGGTGTTTA
CAAACCGGTTGAGCTGGGAGGGGTGCATTCGAGGTGAAATTATGTGCATTTTGGATTGGATTTTTAAGTT
GGCAATATTGCCGCCAAGATCCCGTCTTGGGTTCATGTTATGAAGGACTACCAAGACGGTGTATCCGGTA
CATTTAGGAAATTTATCGTGCAGCTTGGATGGAAAAGCGTGGAAAAATTTGGAGACACCCTTGTGTCCTC
CGAGATTTTCCATGCACTCATCCATGATAATAGCAATGGGGCCGTGGGCAGCGGCGCGGGCAAACACGTT
CCGTGGGTCTGACACATCATAGTTATGTTCCTGAGTTAAATCATCATAAGCCATTTTAATGAATTTGGGG
CGGAGCGTACCAGATTGGGGTATGAATGTTCCTTCGGGCCCCGGAGCATAGTTCCCCTCACAGATTTGCA
TTTCCCAAGCTTTCAGTTCTGAGGGTGGAATCATGTCCACCTGGGGGGCTATGAAGAACACCGTTTCGGG
GGCGGGGGTGATTAGTTGGGATGATAGCAAGTTTCTGAGCAATTGAGATTTGCCACATCCGGTGGGGCCA
TAAATAATTCCGATTACAGGTTGCAGGTGGTAGTTTAGGGAACGGCAACTGCCGTCTTCTCGAAGCAAGG
GGGCCACCTCGTTCATCATTTCCCTTACATGCATATTTTCCCGCACCAAATCCATTAGGAGGCGCTCTCC
TCCTAGTGATAGAAGTTCTTGTAGTGAGGAAAAGTTTTTCAGCGGTTTTAGACCGTCAGCCATGGGCATT
TTGGAAAGAGTTTGCTGCAAAAGTTCTAGTCTGTTCCACAGTTCAGTGATGTGTTCTATGGCATCTCGAT
CCAGCAGACCTCCTCGTTTCGCGGGTTTGGACGGCTCCTGGAGTAGGGTATGAGACGATGGGCGTCCAGC
GCTGCCAGGGTTCGGTCCTTCCAGGGTCTCAGTGTTCGAGTCAGGGTTGTTTCCGTCACAGTGAAGGGGT
GTGCGCCTGCTTGGGCGCTTGCCAGGGTGCGCTTCAGACTCATTCTGCTGGTGGAGAACTTCTGTCGCTT
GGCGCCCTGTATGTCGGCCAAGTAGCAGTTTACCATGAGTTCGTAGTTGAGCGCCTCGGCTGCGTGGCCT
TTGGCGCGGAGCTTACCTTTGGAAGTTTTCTTGCATACCGGGCAGTATAGGCATTTCAGCGCATACAGCT
TGGGCGCAAGGAAAATGGATTCTGGGGAGTATGCATCCGCGCCGCAGGAGGCGCAAACAGTTTCACATTC
CACCAGCCAGGTTAAATCCGGTTCATTGGGGTCAAAAACAAGTTTTCCGCCATATTTTTTGATGCGTTTC
TTACCTTTGGTCTCCATAAGTTCGTGTCCTCGTTGAGTGACAAACAGGCTGTCCGTATCTCCGTAGACTG
ATTTTACAGGCCTCTTCTCCAGTGGAGTGCCTCGGTCTTCTTCGTACAGGAACTCTGACCACTCTGATAC
AAAGGCGCGCGTCCAGGCCAGCACAAAGGAGGCTATGTGGGAGGGGTAGCGATCGTTGTCAACCAGGGGG
TCCACCTTTTCCAAAGTATGCAAACACATGTCACCCTCTTCAACATCCAGGAATGTGATTGGCTTGTAGG
TGTATTTCACGTGACCTGGGGTCCCCGCTGGGGGGGTATAAAAGGGGGCGGTTCTTTGCTCTTCCTCACT
GTCTTCCGGATCGCTGTCCAGGAACGTCAGCTGTTGGGGTAGGTATTCCCTCTCGAAGGCGGGCATGACC
TCTGCACTCAGGTTGTCAGTTTCTAAGAACGAGGAGGATTTGATATTGACAGTGCCGGTTGAGATGCCTT
TCATGAGGTTTTCGTCCATTTGGTCAGAAAACACAATTTTTTTATTGTCAAGTTTGGTGGCAAATGATCC
ATACAGGGCGTTGGATAAAAGTTTGGCAATGGATCGCATGGTTTGGTTCTTTTCCTTGTCCGCGCGCTCT
TTGGCGGCGATGTTGAGTTGGACATACTCGCGTGCCAGGCACTTCCATTCGGGGAAGATAGTTGTTAATT
CATCTGGCACGATTCTCACTTGCCACCCTCGATTATGCAAGGTAATTAAATCCACACTGGTGGCCACCTC
GCCTCGAAGGGGTTCATTGGTCCAACAGAGCCTACCTCCTTTCCTAGAACAGAAAGGGGGAAGTGGGTCT
AGCATAAGTTCATCGGGAGGGTCTGCATCCATGGTAAAGATTCCCGGAAGTAAATCCTTATCAAAATAGC
TGATGGGAGTGGGGTCATCTAAGGCCATTTGCCATTCTCGAGCTGCCAGTGCGCGCTCATATGGGTTAAG
GGGACTGCCCCAGGGCATGGGATGGGTGAGAGCAGAGGCATACATGCCACAGATGTCATAGACGTAGATG
GGATCCTCAAAGATGCCTATGTAGGTTGGATAGCATCGCCCCCCTCTGATACTTGCTCGCACATAGTCAT
ATAGTTCATGTGATGGCGCTAGCAGCCCCGGACCCAAGTTGGTGCGATTGGGTTTTTCTGTTCTGTAGAC
GATCTGGCGAAAGATGGCGTGAGAATTGGAAGAGATGGTGGGTCTTTGAAAAATGTTGAAATGGGCATGA
GGTAGACCTACAGAGTCTCTGACAAAGTGGGCATAAGATTCTTGAAGCTTGGTTACCAGTTCGGCGGTGA
CAAGTACGTCTAGGGCGCAGTAGTCAAGTGTTTCTTGAATGATGTCATAACCTGGTTGGTTTTTCTTTTC
CCACAGTTCGCGGTTGAGAAGGTATTCTTCGCGATCCTTCCAGTACTCTTCTAGCGGAAACCCGTCTTTG
TCTGCACGGTAAGATCCTAGCATGTAGAACTGATTAACTGCCTTGTAAGGGCAGCAGCCCTTCTCTACGG
GTAGAGAGTATGCTTGAGCAGCTTTTCGTAGCGAAGCGTGAGTAAGGGCAAAGGTGTCTCTGACCATGAC
TTTGAGAAATTGGTATTTGAAGTCCATGTCGTCACAGGCTCCCTGTTCCCAGAGTTGGAAGTCTACCCGT
TTCTTGTAGGCGGGGTTGGGCAAAGCGAAAGTAACATCATTGAAGAGAATCTTACCGGCTCTGGGCATAA
AATTGCGAGTGATGCGGAAAGGCTGTGGTACTTCCGCTCGATTGTTGATCACCTGGGCAGCTAGGACGAT
TTCGTCGAAACCGTTGATGTTGTGTCCTACGATGTATAATTCTATGAAACGCGGCGTGCCTCTGACGTGA
GGTAGCTTACTGAGCTCATCAAAGGTTAGGTCTGTGGGGTCAGATAAGGCGTAGTGTTCGAGAGCCCATT
CGTGCAGGTGAGGATTTGCATGTAGGAATGATGACCAAAGATCTACCGCCAGTGCTGTTTGTAACTGGTC
CCGATACTGACGAAAATGCCGGCCAATTGCCATTTTTTCTGGAGTGACACAGTAGAAGGTTCTGGGGTCT
TGTTGCCATCGATCCCACTTGAGTTTAATGGCTAGATCGTGGGCCATGTTGACGAGACGCTCTTCTCCTG
AGAGTTTCATGACCAGCATGAAAGGAACTAGTTGTTTGCCAAAGGATCCCATCCAGGTGTAAGTTTCCAC
ATCGTAGGTCAGGAAGAGTCTTTCTGTGCGAGGATGAGAGCCGATCGGGAAGAACTGGATTTCCTGCCAC
CAGTTGGAGGATTGGCTGTTGATGTGATGGAAGTAGAAGTTTCTGCGGCGCGCCGAGCATTCGTGTTTGT
GCTTGTACAGACGGCCGCAGTAGTCGCAGCGTTGCACGGGTTGTATCTCGTGAATGAGCTGTACCTGGCT
TCCCTTGACGAGAAATTTCAGTGGGAAGCCGAGGCCTGGCGATTGTATCTCGTGCTCTTCTATATTCGCT
GTATCGGCCTGTTCATCTTCTGTTTCGATGGTGGTCATGCTGACGAGCCCCCGCGGGAGGCAAGTCCAGA
CCTCGGCGCGGGAGGGGCGGAGCTGAAGGACGAGAGCGCGCAGGCTGGAGCTGTCCAGAGTCCTGAGACG
CTGCGGACTCAGGTTAGTAGGTAGGGACAGAAGATTAACTTGCATGATCTTTTCCAGGGCGTGCGGGAGG
TTCAGATGGTACTTGATTTCCACAGGTTCGTTTGTAGAGACGTCAATGGCTTGCAGGGTTCCGTGTCCTT
TGGGCGCCACTACCGTACCTTTGTTTTTTCTTTTGATCGGTGGTGGCTCTCTTGCTTCTTGCATGCTCAG
AAGCGGTGACGGGGACGCGCGCCGGGCGGCAGCGGTTGTTCCGGACCCGGGGGCATGGCTGGTAGTGGCA
CGTCGGCGCCGCGCACGGGCAGGTTCTGGTATTGCGCTCTGAGAAGACTTGCGTGCGCCACCACGCGTCG
ATTGACGTCTTGTATCTGACGTCTCTGGGTGAAAGCTACCGGCCCCGTGAGCTTGAACCTGAAAGAGAGT
TCAACAGAATCAATTTCGGTATCGTTAACGGCAGCTTGTCTCAGTATTTCTTGTACGTCACCAGAGTTGT
CCTGGTAGGCGATCTCCGCCATGAACTGCTCGATTTCTTCCTCCTGAAGATCTCCGCGACCCGCTCTTTC
GACGGTGGCCGCGAGGTCATTGGAGATACGGCCCATGAGTTGGGAGAATGCATTCATGCCCGCCTCGTTC
CAGACGCGGCTGTAAACCACGGCCCCCTCGGAGTCTCTTGCGCGCATCACCACCTGAGCGAGGTTAAGCT
CCACGTGTCTGGTGAAGACCGCATAGTTGCATAGGCGCTGAAAAAGGTAGTTGAGTGTGGTGGCAATGTG
TTCGGCGACGAAGAAATACATGATCCATCGTCTCAGCGGCATTTCGCTAACATCGCCCAGAGCTTCCAAG
CGCTCCATGGCCTCGTAGAAGTCCACGGCAAAATTAAAAAACTGGGAGTTTCGCGCGGACACGGTCAATT
CCTCCTCGAGAAGACGGATGAGTTCGGCTATGGTGGCCCGTACTTCGCGTTCGAAGGCTCCCGGGATCTC
TTCTTCCTCTTCTATCTCTTCTTCCACTAACATCTCTTCTTCGTCTTCAGGCGGGGGCGGAGGGGGCACG
CGGCGACGTCGACGGCGCACGGGCAAACGGTCGATGAATCGTTCAATGACCTCTCCGCGGCGGCGGCGCA
TGGTTTCAGTGACGGCGCGGCCGTTCTCGCGCGGTCGCAGAGTAAAAACACCGCCGCGCATCTCCTTAAA
GTGGTGACTGGGAGGTTCTCCGTTTGGGAGGGAGAGGGCGCTGATTATACATTTTATTAATTGGCCCGTA
GGGACTGCGCGCAGAGATCTGATCGTGTCAAGATCCACGGGATCTGAAAACCTTTCGACGAAAGCGTCTA
ACCAGTCACAGTCACAAGGTAGGCTGAGTACGGCTTCTTGTGGGCGGGGGTGGTTATGTGTTCGGTCTGG
GTCTTCTGTTTCTTCTTCATCTCGGGAAGGTGAGACGATGCTGCTGGTGATGAAATTAAAGTAGGCAGTT
CTAAGACGGCGGATGGTGGCGAGGAGCACCAGGTCTTTGGGTCCGGCTTGCTGGATACGCAGGCGATTGG
CCATTCCCCAAGCATTATCCTGACATCTAGCAAGATCTTTGTAGTAGTCTTGCATGAGCCGTTCTACGGG
CACTTCTTCCTCACCCGTTCTGCCATGCATACGTGTGAGTCCAAATCCGCGCATTGGTTGTACCAGTGCC
AAGTCAGCTACGACTCTTTCGGCGAGGATGGCTTGCTGTACTTGGGTAAGGGTGGCTTGAAAGTCATCAA
AATCCACAAAGCGGTGGTAAGCCCCTGTATTAATGGTGTAAGCACAGTTGGCCATGACTGACCAGTTAAC
TGTCTGGTGACCAGGGCGCACGAGCTCGGTGTATTTAAGGCGCGAATAGGCGCGGGTGTCAAAGATGTAA
TCGTTGCAGGTGCGCACCAGATACTGGTACCCTATAAGAAAATGCGGCGGTGGTTGGCGGTAGAGAGGCC
ATCGTTCTGTAGCTGGAGCGCCAGGGGCGAGGTCTTCCAACATAAGGCGGTGATAGCCGTAGATGTACCT
GGACATCCAGGTGATTCCTGCGGCGGTAGTAGAAGCCCGAGGAAACTCGCGTACGCGGTTCCAAATGTTG
CGTAGCGGCATGAAGTAGTTCATTGTAGGCACGGTTTGACCAGTGAGGCGCGCGCAGTCATTGATGCTCT
ATAGACACGGAGAAAATGAAAGCGTTCAGCGACTCGACTCCGTAGCCTGGAGGAACGTGAACGGGTTGGG
TCGCGGTGTACCCCGGTTCGAGACTTGTACTCGAGCCGGCCGGAGCCGCGGCTAACGTGGTATTGGCACT
CCCGTCTCGACCCAGCCTACAAAAATCCAGGATACGGAATCGAGTCGTTTTGCTGGTTTCCGAATGGCAG
GGAAGTGAGTCCTATTTTTTTTTTTTTTGCCGCTCAGATGCATCCCGTGCTGCGACAGATGCGCCCCCAA
CAACAGCCCCCCTCGCAGCAGCAGCAGCAGCAACCACAAAAGGCTGTCCCTGCAACTACTGCAACTGCCG
CCGTGAGCGGTGCGGGACAGCCCGCCTATGATCTGGACTTGGAAGAGGGCGAAGGACTGGCACGTCTAGG
TGCGCCTTCGCCCGAGCGGCATCCGCGAGTTCAACTGAAAAAAGATTCTCGCGAGGCGTATGTGCCCCAA
CAGAACCTATTTAGAGACAGAAGCGGCGAGGAGCCGGAGGAGATGCGAGCTTCCCGCTTTAACGCGGGTC
GTGAGCTGCGTCACGGTTTGGACCGAAGACGAGTGTTGCGAGACGAGGATTTCGAAGTTGATGAAGTGAC
AGGGATCAGTCCTGCCAGGGCACACGTGGCTGCAGCCAACCTTGTATCGGCTTACGAGCAGACAGTAAAG
GAAGAGCGTAACTTCCAAAAGTCTTTTAATAATCATGTGCGAACCCTGATTGCCCGCGAAGAAGTTACCC
TTGGTTTGATGCATTTGTGGGATTTGATGGAAGCTATCATTCAGAACCCTACTAGCAAACCTCTGACCGC
CCAGCTGTTTCTGGTGGTGCAACACAGCAGAGACAATGAGGCTTTCAGAGAGGCGCTGCTGAACATCACC
GAACCCGAGGGGAGATGGTTGTATGATCTTATCAACATTCTACAGAGTATCATAGTGCAGGAGCGGAGCC
TGGGCCTGGCCGAGAAGGTAGCTGCCATCAATTACTCGGTTTTGAGCTTGGGAAAATATTACGCTCGCAA
AATCTACAAGACTCCATACGTTCCCATAGACAAGGAGGTGAAGATAGATGGGTTCTACATGCGCATGACG
CTCAAGGTCTTGACCCTGAGCGATGATCTTGGGGTGTATCGCAATGACAGAATGCATCGCGCGGTTAGCG
CCAGCAGGAGGCGCGAGTTAAGCGACAGGGAACTGATGCACAGTTTGCAAAGAGCTCTGACTGGAGCTGG
AACCGAGGGTGAGAATTACTTCGACATGGGAGCTGACTTGCAGTGGCAGCCTAGTCGCAGGGCTCTGAGC
GCCGCGACGGCAGGATGTGAGCTTCCTTACATAGAAGAGGCGGATGAAGGCGAGGAGGAAGAGGGCGAGT
ACTTGGAAGACTGATGGCACAACCCGTGTTTTTTGCTAGATGGAACAGCAAGCACCGGATCCCGCAATGC
GGGCGGCGCTGCAGAGCCAGCCGTCCGGCATTAACTCCTCGGACGATTGGACCCAGGCCATGCAACGTAT
CATGGCGTTGACGACTCGCAACCCCGAAGCCTTTAGACAGCAACCCCAGGCCAACCGTCTATCGGCCATC
ATGGAAGCTGTAGTGCCTTCCCGATCTAATCCCACTCATGAGAAGGTCCTGGCCATCGTGAACGCGTTGG
TGGAGAACAAAGCTATTCGTCCAGATGAGGCCGGACTGGTATACAACGCTCTCTTAGAACGCGTGGCTCG
CTACAACAGTAGCAATGTGCAAACCAATTTGGACCGTATGATAACAGATGTACGCGAAGCCGTGTCTCAG
CGCGAAAGGTTCCAGCGTGATGCCAACCTGGGTTCGCTGGTGGCGTTAAATGCTTTCTTGAGTACTCAGC
CTGCTAATGTGCCGCGTGGTCAACAGGATTATACTAACTTTTTAAGTGCTTTGAGACTGATGGTATCAGA
AGTACCTCAGAGCGAAGTGTATCAGTCCGGTCCTGATTACTTCTTTCAGACTAGCAGACAGGGCTTGCAG
ACGGTAAATCTGAGCCAAGCTTTTAAAAACCTTAAAGGTTTGTGGGGAGTGCATGCCCCGGTAGGAGAAA
GAGCAACCGTGTCTAGCTTGTTAACTCCGAACTCCCGCCTGTTATTACTGTTGGTAGCTCCTTTCACCGA
CAGCGGTAGCATCGACCGTAATTCCTATTTGGGTTACCTACTAAACCTGTATCGCGAAGCCATAGGGCAA
AGTCAGGTGGACGAGCAGACCTATCAAGAAATTACCCAAGTCAGTCGCGCTTTGGGACAGGAAGACACTG
GCAGTTTGGAAGCCACTCTGAACTTCTTGCTTACCAATCGGTCTCAAAAGATCCCTCCTCAATATGCTCT
TACTGCGGAGGAGGAGAGGATCCTTAGATATGTGCAGCAGAGCGTGGGATTGTTTCTGATGCAAGAGGGG
GCAACTCCGACTGCAGCACTGGACATGACAGCGCGAAATATGGAGCCCAGCATGTATGCCAGTAACCGAC
CTTTCATTAACAAACTGCTGGACTACTTGCACAGAGCTGCCGCTATGAACTCTGATTATTTCACCAATGC
CATCTTAAACCCGCACTGGCTGCCCCCACCTGGTTTCTACACGGGCGAATATGACATGCCCGACCCTAAT
GACGGATTTCTGTGGGACGACGTGGACAGCGATGTTTTTTCACCTCTTTCTGATCATCGCACGTGGAAAA
AGGAAGGCGGTGATAGAATGCATTCTTCTGCATCGCTGTCCGGGGTCATGGGTGCTACCGCGGCTGAGCC
CGAGTCTGCAAGTCCTTTTCCTAGTCTACCCTTTTCTCTACACAGTGTACGTAGCAGCGAAGTGGGTAGA
ATAAGTCGCCCGAGTTTAATGGGCGAAGAGGAGTACCTAAACGATTCCTTGCTCAGACCGGCAAGAGAAA
AAAATTTCCCAAACAATGGAATAGAAAGTTTGGTGGATAAAATGAGTAGATGGAAGACTTATGCTCAGGA
TCACAGAGACGAGCCTGGGATCATGGGGACTACAAGTAGAGCGAGCCGTAGACGCCAGCGCCATGACAGA
CAGAGGGGTCTTGTGTGGGACGATGAGGATTCGGCCGATGATAGCAGCGTGTTGGACTTGGGTGGGAGAG
GAAGGGGCAACCCGTTTGCTCATTTGCGCCCTCGCTTGGGTGGTATGTTGTGAAAAAAAATAAAAAAGAA
AAACTCACCAAGGCCATGGCGACGAGCGTACGTTCGTTCTTCTTTATTATCTGTGTCTAGTATAATGAGG
CGAGTCGTGCTAGGCGGAGCGGTGGTGTATCCGGAGGGTCCTCCTCCTTCGTACGAGAGCGTGATGCAGC
AGCAGCAGGCGACGGCGGTGATGCAATCCCCACTGGAGGCTCCCTTTGTGCCTCCGCGATACCTGGCACC
TACGGAGGGCAGAAACAGCATTCGTTACTCGGAACTGGCACCTCAGTACGATACCACCAGGTTGTATCTG
GTGGACAACAAGTCGGCGGACATTGCTTCTCTGAACTATCAGAATGACCACAGCAACTTCTTGACCACGG
TGGTGCAGAACAATGACTTTACCCCTACGGAAGCCAGCACCCAGACCATTAACTTTGATGAACGATCGCG
GTGGGGCGGTCAGCTAAAGACCATCATGCATACTAACATGCCAAACGTGAACGAGTATATGTTTAGTAAC
AAGTTCAAAGCGCGTGTGATGGTGTCCAGAAAACCTCCCGACGGTGCTGCAGTTGGGGATACTTATGATC
ACAAGCAGGATATTTTGGAATATGAGTGGTTCGAGTTTACTTTGCCAGAAGGCAACTTTTCAGTTACTAT
GACTATTGATTTGATGAACAATGCCATCATAGATAATTACTTGAAAGTGGGTAGACAGAATGGAGTGCTT
GAAAGTGACATTGGTGTTAAGTTCGACACCAGGAACTTCAAGCTGGGATGGGATCCCGAAACCAAGTTGA
TCATGCCTGGAGTGTATACGTATGAAGCCTTCCATCCTGACATTGTCTTACTGCCTGGCTGCGGAGTGGA
TTTTACCGAGAGTCGTTTGAGCAACCTTCTTGGTATCAGAAAAAAACAGCCATTTCAAGAGGGTTTTAAG
ATTTTGTATGAAGATTTAGAAGGTGGTAATATTCCGGCCCTCTTGGATGTAGATGCCTATGAGAACAGTA
AGAAAGAACAAAAAGCCAAAATAGAAGCTGCTACAGCTGCTGCAGAAGCTAAGGCAAACATAGTTGCCAG
CGACTCTACAAGGGTTGCTAACGCTGGAGAGGTCAGAGGAGACAATTTTGCGCCAACACCTGTTCCGACT
GCAGAATCATTATTGGCCGATGTGTCTGAAGGAACGGACGTGAAACTCACTATTCAACCTGTAGAAAAAG
ATAGTAAGAATAGAAGCTATAATGTGTTGGAAGACAAAATCAACACAGCCTATCGCAGTTGGTATCTTTC
GTACAATTATGGCGATCCCGAAAAAGGAGTGCGTTCCTGGACATTGCTCACCACCTCAGATGTCACCTGC
GGAGCAGAGCAGGTTTACTGGTCGCTTCCAGACATGATGAAGGATCCTGTCACTTTCCGCTCCACTAGAC
AAGTCAGTAACTACCCTGTGGTGGGTGCAGAGCTTATGCCCGTCTTCTCAAAGAGCTTCTACAACGAACA
AGCTGTGTACTCCCAGCAGCTCCGCCAGTCCACCTCGCTTACGCACGTCTTCAACCGCTTTCCTGAGAAC
CAGATTTTAATCCGTCCGCCGGCGCCCACCATTACCACCGTCAGTGAAAACGTTCCTGCTCTCACAGATC
ACGGGACCCTGCCGTTGCGCAGCAGTATCCGGGGAGTCCAACGTGTGACCGTTACTGACGCCAGACGCCG
CACCTGTCCCTACGTGTACAAGGCACTGGGCATAGTCGCACCGCGCGTCCTTTCAAGCCGCACTTTCTAA
AAAAAAAATGTCCATTCTTATCTCGCCCAGTAATAACACCGGTTGGGGTCTGCGCGCTCCAAGCAAGATG
TACGGAGGCGCACGCAAACGTTCTACCCAACATCCCGTGCGTGTTCGCGGACATTTTCGCGCTCCATGGG
GTGCCCTCAAGGGCCGCACTCGCGTTCGAACCACCGTCGATGATGTAATCGATCAGGTGGTTGCCGACGC
CCGTAATTATACTCCTACTGCGCCTACATCTACTGTGGATGCAGTTATTGACAGTGTAGTGGCTGACGCT
CGCAACTATGCTCGACGTAAGAGCCGGCGAAGGCGCATTGCCAGACGCCACCGAGCTACCACTGCCATGC
GAGCCGCAAGAGCTCTGCTACGAAGAGCTAGACGCGTGGGGCGAAGAGCCATGCTTAGGGCGGCCAGACG
TGCAGCTTCGGGCGCCAGCGCCGGCAGGTCCCGCAGGCAAGCAGCCGCTGTCGCAGCGGCGACTATTGCC
GACATGGCCCAATCGCGAAGAGGCAATGTATACTGGGTGCGTGACGCTGCCACCGGTCAACGTGTACCCG
TGCGCACCCGTCCCCCTCGCACTTAGAAGATACTGAGCAGTCTCCGATGTTGTGTCCCAGCGGCGAGGAT
GTCCAAGCGCAAATACAAGGAAGAAATGCTGCAGGTTATCGCACCTGAAGTCTACGGCCAACCGTTGAAG
GATGAAAAAAAACCCCGCAAAATCAAGCGGGTTAAAAAGGACAAAAAAGAAGAGGAAGATGGCGATGATG
GGCTGGCGGAGTTTGTGCGCGAGTTTGCCCCACGGCGACGCGTGCAATGGCGTGGGCGCAAAGTTCGACA
TGTGTTGAGACCTGGAACTTCGGTGGTCTTTACACCCGGCGAGCGTTCAAGCGCTACTTTTAAGCGTTCC
TATGATGAGGTGTACGGGGATGATGATATTCTTGAGCAGGCGGCTGACCGATTAGGCGAGTTTGCTTATG
GCAAGCGTAGTAGAATAACTTCCAAGGATGAGACAGTGTCAATACCCTTGGATCATGGAAATCCCACCCC
TAGTCTTAAACCGGTCACTTTGCAGCAAGTGTTACCCGTAACTCCGCGAACAGGTGTTAAACGCGAAGGT
GAAGATTTGTATCCCACTATGCAACTGATGGTACCCAAACGCCAGAAGTTGGAGGACGTTTTGGAGAAAG
TAAAAGTGGATCCAGATATTCAACCTGAGGTTAAAGTGAGACCCATTAAGCAGGTAGCGCCTGGTCTGGG
GGTACAAACTGTAGACATTAAGATTCCCACTGAAAGTATGGAAGTGCAAACTGAACCCGCAAAGCCTACT
GCCACCTCCACTGAAGTGCAAACGGATCCATGGATGCCCATGCCTATTACAACTGACGCCGCCGGTCCCA
CTCGAAGATCCCGACGAAAGTACGGTCCAGCAAGTCTGTTGATGCCCAATTATGTTGTACACCCATCTAT
TATTCCTACTCCTGGTTACCGAGGCACTCGCTACTATCGCAGCCGAAACAGTACCTCCCGCCGTCGCCGC
AAGACACCTGCAAATCGCAGTCGTCGCCGTAGACGCACAAGCAAACCGACTCCCGGCGCCCTGGTGCGGC
AAGTGTACCGCAATGGTAGTGCGGAACCTTTGACACTGCCGCGTGCGCGTTACCATCCGAGTATCATCAC
TTAATCAATGTTGCCGCTGCCTCCTTGCAGATATGGCCCTCACTTGTCGCCTTCGCGTTCCCATCACTGG
TTACCGAGGAAGAAACTCGCGCCGTAGAAGAGGGATGTTGGGACGCGGAATGCGACGCTACAGGCGACGG
CGTGCTATCCGCAAGCAATTGCGGGGTGGTTTTTTACCAGCCTTAATTCCAATTATCGCTGCTGCAATTG
GCGCGATACCAGGCATAGCTTCCGTGGCGGTTCAGGCCTCGCAACGACATTGACATTGGAAAAAAAACGT
ATAAATAAAAAAAAATACAATGGACTCTGACACTCCTGGTCCTGTGACTATGTTTTCTTAGAGATGGAAG
ACATCAATTTTTCATCCTTGGCTCCGCGACACGGCACGAAGCCGTACATGGGCACCTGGAGCGACATCGG
CACGAGCCAACTGAACGGGGGCGCCTTCAATTGGAGCAGTATCTGGAGCGGGCTTAAAAATTTTGGCTCA
ACCATAAAAACATACGGGAACAAAGCTTGGAACAGCAGTACAGGACAGGCGCTTAGAAATAAACTTAAAG
ACCAGAACTTCCAACAAAAAGTAGTCGATGGGATAGCTTCCGGCATCAATGGAGTGGTAGATTTGGCTAA
CCAGGCTGTGCAGAAAAAGATAAACAGTCGTTTGGACCCGCCGCCAGCAACCCCAGGTGAAATGCAAGTG
GAGGAAGAAATTCCTCCGCCAGAAAAACGAGGCGACAAGCGTCCGCGTCCCGATTTGGAAGAGACGCTGG
TGACGCGCGTAGATGAACCGCCTTCTTATGAGGAAGCAACGAAGCTTGGAATGCCCACCACTAGACCGAT
AGCCCCAATGGCCACCGGGGTGATGAAACCTTCTCAGTTGCATCGACCCGTCACCTTGGATTTGCCCCCT
CCCCCTGCTGCTACTGCTGTACCCGCTTCTAAGCCTGTCGCTGCCCCGAAACCAGTCGCCGTAGCCAGGT
CACGTCCCGGGGGCGCTCCTCGTCCAAATGCGCACTGGCAAAATACTCTGAACAGCATCGTGGGTCTAGG
CGTGCAAAGTGTAAAACGCCGTCGCTGCTTTTAATTAAATATGGAGTAGCGCTTAACTTGCCTATCTGTG
TATATGTGTCATTACACGCCGTCACAGCAGCAGAGGAAAAAAGGAAGAGGTCGTGCGTCGACGCTGAGTT
ACTTTCAAGATGGCCACCCCATCGATGCTGCCCCAATGGGCATACATGCACATCGCCGGACAGGATGCTT
CGGAGTACCTGAGTCCGGGTCTGGTGCAGTTCGCCCGCGCCACAGACACCTACTTCAATCTGGGAAATAA
GTTTAGAAATCCCACCGTAGCGCCGACCCACGATGTGACCACCGACCGTAGCCAGCGGCTCATGTTGCGC
TTCGTGCCCGTTGACCGGGAGGACAATACATACTCTTACAAAGTGCGGTACACCCTGGCCGTGGGCGACA
ACAGAGTGCTGGATATGGCCAGCACGTTCTTTGACATTAGGGGCGTGTTGGACAGAGGTCCCAGTTTCAA
ACCCTATTCTGGTACGGCTTACAACTCTCTGGCTCCTAAAGGCGCTCCAAATGCATCTCAATGGATTGCA
AAAGGCGTACCAACTGCAGCAGCCGCAGGCAATGGTGAAGAAGAACATGAAACAGAGGAGAAAACTGCTA
CTTACACTTTTGCCAATGCTCCTGTAAAAGCCGAGGCTCAAATTACAAAAGAGGGCTTACCAATAGGTTT
GGAGATTTCAGCTGAAAACGAATCTAAACCCATCTATGCAGATAAACTTTATCAGCCAGAACCTCAAGTG
GGAGATGAAACTTGGACTGACCTAGACGGAAAAACCGAAGAGTATGGAGGCAGGGCTCTAAAGCCTACTA
CTAACATGAAACCCTGTTACGGGTCCTATGCGAAGCCTACTAATTTAAAAGGTGGTCAGGCAAAACCGAA
AAACTCGGAACCGTCGAGTGAAAAAATTGAATATGATATTGACATGGAATTTTTTGATAACTCATCGCAA
AGAACAAACTTCAGTCCTAAAATTGTCATGTATGCAGAAAATGTAGGTTTGGAAACGCCAGACACTCATG
TAGTGTACAAACCTGGAACAGAAGACACAAGTTCCGAAGCTAATTTGGGACAACAGTCTATGCCCAACAG
ACCCAACTACATTGGCTTCAGAGATAACTTTATTGGACTCATGTACTATAACAGTACTGGTAACATGGGG
GTGCTGGCTGGTCAAGCGTCTCAGTTAAATGCAGTGGTTGACTTGCAGGACAGAAACACAGAACTTTCTT
ACCAACTCTTGCTTGACTCTCTGGGCGACAGAACCAGATACTTTAGCATGTGGAATCAGGCTGTGGACAG
TTATGATCCTGATGTACGTGTTATTGAAAATCATGGTGTGGAAGATGAACTTCCCAACTATTGTTTTCCA
CTGGACGGCATAGGTGTTCCAACAACCAGTTACAAATCAATAGTTCCAAATGGAGAAGATAATAATAATT
GGAAAGAACCTGAAGTAAATGGAACAAGTGAGATCGGACAGGGTAATTTGTTTGCCATGGAAATTAACCT
TCAAGCCAATCTATGGCGAAGTTTCCTTTATTCCAATGTGGCTCTGTATCTCCCAGACTCGTACAAATAC
ACCCCGTCCAATGTCACTCTTCCAGAAAACAAAAACACCTACGACTACATGAACGGGCGGGTGGTGCCGC
CATCTCTAGTAGACACCTATGTGAACATTGGTGCCAGGTGGTCTCTGGATGCCATGGACAATGTCAACCC
ATTCAACCACCACCGTAACGCTGGCTTGCGTTACCGATCTATGCTTCTGGGTAACGGACGTTATGTGCCT
TTCCACATACAAGTGCCTCAAAAATTCTTCGCTGTTAAAAACCTGCTGCTTCTCCCAGGCTCCTACACTT
ATGAGTGGAACTTTAGGAAGGATGTGAACATGGTTCTACAGAGTTCCCTCGGTAACGACCTGCGGGTAGA
TGGCGCCAGCATCAGTTTCACGAGCATCAACCTCTATGCTACTTTTTTCCCCATGGCTCACAACACCGCT
TCCACCCTTGAAGCCATGCTGCGGAATGACACCAATGATCAGTCATTCAACGACTACCTATCTGCAGCTA
ACATGCTCTACCCCATTCCTGCCAATGCAACCAATATTCCCATTTCCATTCCTTCTCGCAACTGGGCGGC
TTTCAGAGGCTGGTCATTTACCAGACTGAAAACCAAAGAAACTCCCTCTTTGGGGTCTGGATTTGACCCC
TACTTTGTCTATTCTGGTTCTATTCCCTACCTGGATGGTACCTTCTACCTGAACCACACTTTTAAGAAGG
TTTCCATCATGTTTGACTCTTCAGTGAGCTGGCCTGGAAATGACAGGTTACTATCTCCTAACGAATTTGA
AATAAAGCGCACTGTGGATGGCGAAGGCTACAACGTAGCCCAATGCAACATGACCAAAGACTGGTTCTTG
GTACAGATGCTCGCCAACTACAACATCGGCTATCAGGGCTTCTACATTCCAGAAGGATACAAAGATCGCA
TGTATTCATTTTTCAGAAACTTCCAGCCCATGAGCAGGCAGGTGGTTGATGAGGTCAATTACAAAGACTT
CAAGGCCGTCGCCATACCCTACCAACACAACAACTCTGGCTTTGTGGGTTACATGGCTCCGACCATGCGC
CAAGGTCAACCCTATCCCGCTAACTATCCCTATCCACTCATTGGAACAACTGCCGTAAATAGTGTTACGC
AGAAAAAGTTCTTGTGTGACAGAACCATGTGGCGCATACCGTTCTCGAGCAACTTCATGTCTATGGGGGC
CCTTACAGACTTGGGACAGAATATGCTCTATGCCAACTCAGCTCATGCTCTGGACATGACCTTTGAGGTG
GATCCCATGGATGAGCCCACCCTGCTTTATCTTCTCTTCGAAGTTTTCGACGTGGTCAGAGTGCATCAGC
CACACCGCGGCATCATCGAGGCAGTCTACCTGCGTACACCGTTCTCGGCCGGTAACGCTACCACGTAAGA
AGCTTCTTGCTTCTTGCAAATAGCAGCTGCAACCATGGCCTGCGGATCCCAAAACGGCTCCAGCGAGCAA
GAGCTCAGAGCCATTGTCCAAGACCTGGGTTGCGGACCCTATTTTTTGGGAACCTACGATAAGCGCTTCC
CGGGGTTCATGGCCCCCGATAAGCTCGCCTGTGCCATTGTAAATACGGCCGGACGTGAGACGGGGGGAGA
GCACTGGTTGGCTTTCGGTTGGAACCCACGTTCTAACACCTGCTACCTTTTTGATCCTTTTGGATTCTCG
GATGATCGTCTCAAACAGATTTACCAGTTTGAATATGAGGGTCTCCTGCGCCGCAGCGCTCTTGCTACCA
AGGACCGCTGTATTACGCTGGAAAAATCTACCCAGACCGTGCAGGGCCCCCGTTCTGCCGCCTGCGGACT
TTTCTGCTGCATGTTCCTTCACGCCTTTGTGCACTGGCCTGACCGTCCCATGGACGGAAACCCCACCATG
AAATTGCTAACTGGAGTGCCAAACAACATGCTTCATTCTCCTAAAGTCCAGCCCACCCTGTGTGACAATC
AAAAAGCACTCTACCATTTTCTTAATACCCATTCGCCTTATTTTCGCTCTCATCGTACACACATCGAAAG
GGCCACTGCGTTCGACCGTATGGATGTTCAATAATGACTCATGTAAACAACGTGTTCAATAAACATCACT
TTATTTTTTTACATGTATCAAGGCTCTGGATTACTTATTTATTTACAAGTCGAATGGGTTCTGACGAGAA
TCAGAATGACCCGCAGGCAGTGATACGTTGCGGAACTGATACTTGGGTTGCCACTTGAATTCGGGAATCA
CCAACTTGGGAACCGGTATATCGGGCAGGATGTCACTCCACAGCTTTCTGGTCAGCTGCAAAGCTCCAAG
CAGGTCAGGAGCCGAAATCTTGAAATCACAATTAGGACCAGTGCTCTGAGCGCGAGAGTTGCGGTACACC
GGATTGCAGCACTGAAACACCATCAGCGACGGATGTCTCACGCTTGCCAGCACGGTGGGATCTGCAATCA
TGCCCACATCCAGATCTTCAGCATTGGCAATGCTGAACGGGGTCATCTTGCAGGTCTGCCTACCCATGGC
GGGCACCCAATTAGGCTTGTGGTTGCAATCGCAGTGCAGGGGGATCAGTATCATCTTGGCCTGATCCTGT
CTGATTCCTGGATACACGGCTCTCATGAAAGCATCATATTGCTTGAAAGCCTGCTGGGCTTTACTACCCT
CGGTATAAAACATCCCGCAGGACCTGCTCGAAAACTGGTTAGCTGCACAGCCGGCATCATTCACACAGCA
GCGGGCGTCATTGTTGGCTATTTGCACCACACTTCTGCCCCAGCGGTTTTGGGTGATTTTGGTTCGCTCG
GGATTCTCCTTTAAGGCTCGTTGTCCGTTCTCGCTGGCCACATCCATCTCGATAATCTGCTCCTTCTGAA
TCATAATATTGCCATGCAGGCACTTCAGCTTGCCCTCATAATCATTGCAGCCATGAGGCCACAACGCACA
GCCTGTACATTCCCAATTATGGTGGGCGATCTGAGAAAAAGAATGTATCATTCCCTGCAGAAATCTTCCC
ATCATCGTGCTCAGTGTCTTGTGACTAGTGAAAGTTAACTGGATGCCTCGGTGCTCTTCGTTTACGTACT
GGTGACAGATGCGCTTGTATTGTTCGTGTTGCTCAGGCATTAGTTTAAAACAGGTTCTAAGTTCGTTATC
CAGCCTGTACTTCTCCATCAGCAGACACATCACTTCCATGCCTTTCTCCCAAGCAGACACCAGGGGCAAG
CTAATCGGATTCTTAACAGTGCAGGCAGCAGCTCCTTTAGCCAGAGGGTCATCTTTAGCGATCTTCTCAA
TGCTTCTTTTGCCATCCTTCTCAACGATGCGCACGGGCGGGTAGCTGAAACCCACTGCTACAAGTTGCGC
CTCTTCTCTTTCTTCTTCGCTGTCTTGACTGATGTCTTGCATGGGGATATGTTTGGTCTTCCTTGGCTTC
TTTTTGGGGGGTATCGGAGGAGGAGGACTGTCGCTCCGTTCCGGAGACAGGGAGGATTGTGACGTTTCGC
TCACCATTACCAACTGACTGTCGGTAGAAGAACCTGACCCCACACGGCGACAGGTGTTTTTCTTCGGGGG
CAGAGGTGGAGGCGATTGCGAAGGGCTGCGGTCCGACCTGGAAGGCGGATGACTGGCAGAACCCCTTCCG
CGTTCGGGGGTGTGCTCCCTGTGGCGGTCGCTTAACTGATTTCCTTCGCGGCTGGCCATTGTGTTCTCCT
AGGCAGAGAAACAACAGACATGGAAACTCAGCCATTGCTGTCAACATCGCCACGAGTGCCATCACATCTC
GTCCTCAGCGACGAGGAAAAGGAGCAGAGCTTAAGCATTCCACCGCCCAGTCCTGCCACCACCTCTACCC
TAGAAGATAAGGAGGTCGACGCATCTCATGACATGCAGAATAAAAAAGCGAAAGAGTCTGAGACAGACAT
CGAGCAAGACCCGGGCTATGTGACACCGGTGGAACACGAGGAAGAGTTGAAACGCTTTCTAGAGAGAGAG
GATGAAAACTGCCCAAAACAGCGAGCAGATAACTATCACCAAGATGCTGGAAATAGGGATCAGAACACCG
ACTACCTCATAGGGCTTGACGGGGAAGACGCGCTCCTTAAACATCTAGCAAGACAGTCGCTCATAGTCAA
GGATGCATTATTGGACAGAACTGAAGTGCCCATCAGTGTGGAAGAGCTCAGCTGCGCCTACGAGCTTAAC
CTTTTTTCACCTCGTACTCCCCCCAAACGTCAGCCAAACGGCACCTGCGAGCCAAATCCTCGCTTAAACT
TTTATCCAGCTTTTGCTGTGCCAGAAGTACTGGCTACCTATCACATCTTTTTTAAAAATCAAAAAATTCC
AGTCTCCTGCCGCGCTAATCGCACCCGCGCCGATGCCCTACTCAATCTGGGACCTGGTTCACGCTTACCT
GATATAGCTTCCTTGGAAGAGGTTCCAAAGATCTTCGAGGGTCTGGGCAATAATGAGACTCGGGCCGCAA
ATGCTCTGCAAAAGGGAGAAAATGGCATGGATGAGCATCACAGCGTTCTGGTGGAATTGGAAGGCGATAA
TGCCAGACTCGCAGTACTCAAGCGAAGCGTCGAGGTCACACACTTCGCATATCCCGCTGTCAACCTGCCC
CCTAAAGTCATGACGGCGGTCATGGACCAGTTACTCATTAAGCGCGCAAGTCCCCTTTCAGAAGACATGC
ATGACCCAGATGCCTGTGATGAGGGTAAACCAGTGGTCAGTGATGAGCAGCTAACCCGATGGCTGGGCAC
CGACTCTCCCCGGGATTTGGAAGAGCGTCGCAAGCTTATGATGGCCGTGGTGCTGGTTACCGTAGAACTA
GAGTGTCTCCGACGTTTCTTTACCGATTCAGAAACCTTGCGCAAACTCGAAGAGAATCTGCACTACACTT
TTAGACACGGCTTTGTGCGGCAGGCATGCAAGATATCTAACGTGGAACTCACCAACCTGGTTTCCTACAT
GGGTATTCTGCATGAGAATCGCCTAGGACAAAGCGTGCTGCACAGCACCCTTAAGGGGGAAGCCCGCCGT
GATTACATCCGCGATTGTGTCTATCTCTACCTGTGCCACACGTGGCAAACCGGCATGGGTGTATGGCAGC
AATGTTTAGAAGAACAGAACTTGAAAGAGCTTGACAAGCTCTTACAGAAATCTCTTAAGGTTCTGTGGAC
AGGGTTCGACGAGCGCACCGTCGCTTCCGACCTGGCAGACCTCATCTTCCCAGAGCGTCTCAGGGTTACT
TTGCGAAACGGATTGCCTGACTTTATGAGCCAGAGCATGCTTAACAATTTTCGCTCTTTCATCCTGGAAC
GCTCCGGTATCCTGCCCGCCACCTGCTGCGCACTGCCCTCCGACTTTGTGCCTCTCACCTACCGCGAGTG
CCCCCCGCCGCTATGGAGTCACTGCTACCTGTTCCGTCTGGCCAACTATCTCTCCTACCACTCGGATGTG
ATCGAGGATGTGAGCGGAGACGGCTTGCTGGAGTGCCACTGCCGCTGCAATCTGTGCACGCCCCACCGGT
CCCTAGCTTGCAACCCCCAGTTGATGAGCGAAACCCAGATAATAGGCACCTTTGAATTGCAAGGCCCCAG
CAGCCAAGGCGATGGGTCTTCTCCTGGGCAAAGTTTAAAACTGACCCCGGGACTGTGGACCTCCGCCTAC
TTGCGCAAGTTTGCTCCGGAAGATTACCACCCCTATGAAATCAAGTTCTATGAGGACCAATCACAGCCTC
CAAAGGCCGAACTTTCGGCTTGCGTCATCACCCAGGGGGCAATTCTGGCCCAATTGCAAGCCATCCAAAA
ATCCCGCCAAGAATTTCTACTGAAAAAGGGTAAGGGGGTCTACCTTGACCCCCAGACCGGCGAGGAACTC
AACACAAGGTTCCCTCAGGATGTCCCAACGACGAGAAAACAAGAAGTTGAAGGTGCAGCCGCCGCCCCCA
GAAGATATGGAGGAAGATTGGGACAGTCAGGCAGAGGAGGCGGAGGAGGACAGTCTGGAGGACAGTCTGG
AGGAAGACAGTTTGGAGGAGGAAAACGAGGAGGCAGAGGAGGTGGAAGAAGTAACCGCCGACAAACAGTT
ATCCTCGGCTGCGGAGACAAGCAACAGCGCTACCATCTCCGCTCCGAGTCGAGGAACCCGGCGGCGTCCC
AGCAGTAGATGGGACGAGACCGGACGCTTCCCGAACCCAACCAGCGCTTCCAAGACCGGTAAGAAGGATC
GGCAGGGATACAAGTCCTGGCGGGGGCATAAGAATGCCATCATCTCCTGCTTGCATGAGTGCGGGGGCAA
CATATCCTTCACGCGGCGCTACTTGCTATTCCACCATGGGGTGAACTTTCCGCGCAATGTTTTGCATTAC
TACCGTCACCTCCACAGCCCCTACTATAGCCAGCAAATCCCGACAGTCTCGACAGATAAAGACAGCGGCG
GCGACCTCCAACAGAAAACCAGCAGCGGCAGTTAGAAAATACACAACAAGTGCAGCAACAGGAGGATTAA
AGATTACAGCCAACGAGCCAGCGCAAACCCGAGAGTTAAGAAATCGGATCTTTCCAACCCTGTATGCCAT
CTTCCAGCAGAGTCGGGGTCAAGAGCAGGAACTGAAAATAAAAAACCGATCTCTGCGTTCGCTCACCAGA
AGTTGTTTGTATCACAAGAGCGAAGATCAACTTCAGCGCACTCTCGAGGACGCCGAGGCTCTCTTCAACA
AGTACTGCGCGCTGACTCTTAAAGAGTAGGCAGCGACCGCGCTTATTCAAAAAAGGCGGGAATTACATCA
TCCTCGACATGAGTAAAGAAATTCCCACGCCTTACATGTGGAGTTATCAACCCCAAATGGGATTGGCAGC
AGGCGCCTCCCAGGACTACTCCACCCGCATGAATTGGCTCAGCGCCGGGCCTTCTATGATTTCTCGAGTT
AATGATATACGCGCCTACCGAAACCAAATACTTTTGGAACAGTCAGCTCTTACCACCACGCCCCGCCAAC
ACCTTAATCCCAGAAATTGGCCCGCCGCCCTAGTGTACCAGGAAAGTCCCGCTCCCACCACTGTATTACT
TCCTCGAGACGCCCAGGCCGAAGTCCAAATGACTAATGCAGGTGCGCAGTTAGCTGGCGGCTCCACCCTA
TGTCGTCACAGGCCTCGGCATAATATAAAACGCCTGATGATCAGAGGCCGAGGTATCCAGCTCAACGACG
AGTCGGTGAGCTCTCCGCTTGGTCTACGACCAGACGGAATCTTTCAGATTGCCGGCTGCGGGAGATCTTC
CTTCACCCCTCGTCAGGCTGTTCTGACTTTGGAAAGTTCGTCTTCGCAACCCCGCTCGGGCGGAATCGGG
ACCGTTCAATTTGTAGAGGAGTTTACTCCCTCTGTCTACTTCAACCCCTTCTCCGGATCTCCTGGGCACT
ACCCGGACGAGTTCATACCGAACTTCGACGCGATTAGCGAGTCAGTGGACGGCTACGATTGATGTCTGGT
GACGCGGCTGAGCTATCTCGGCTGCGACATCTAGACCACTGCCGCCGCTTTCGCTGCTTTGCCCGGGAAC
TTATTGAGTTCATCTACTTCGAACTCCCCAAGGATCACCCTCAAGGTCCGGCCCACGGAGTGCGGATTAC
TATCGAAGGCAAAATAGACTCTCGCCTGCAACGAATTTTCTCCCAGCGGCCCGTGCTGATCGAGCGAGAC
CAGGGAAACACCACGGTTAGTAATCAATTACGGGGTCATTAGTTCATAGCCCATATATGGAGTTAACTTG
TTTATTGCAGCTTATAATGGTTACAAATAAAGCAATAGCATCACAAATTTCACAAATAAAGCATTTTTTT
CACTGCATTCTAGTTGTGGTTTGTCCAAACTCATCAATGTATCTTATCATGTCTGCTCGAAGCGGCCGGC
CGCCCCGACTCTAGAGTCGCGGCCTCATTAGGAAGTTCCTATACTTTCTAGAGAATAGGAACTTCTCAGA
AGAACTCGTCAAGAAGGCGATAGAAGGCGATGCGCTGCGAATCGGGAGCGGCGATACCGTAAAGCACGAG
GAAGCGGTCAGCCCATTCGCCGCCAAGCTCTTCAGCAATATCACGGGTAGCCAACGCTATGTCCTGATAG
CGGTCCGCCACACCCAGCCGGCCACAGTCGATGAATCCAGAAAAGCGGCCATTTTCCACCATGATATTCG
GCAAGCAGGCATCGCCATGGGTCACGACGAGATCCTCGCCGTCGGGCATGCGCGCCTTGAGCCTGGCGAA
CAGTTCGGCTGGCGCGAGCCCCTGATGCTCTTCGTCCAGATCATCCTGATCGACAAGACCGGCTTCCATC
CGAGTACGTGCTCGCTCGATGCGATGTTTCGCTTGGTGGTCGAATGGGCAGGTAGCCGGATCAAGCGTAT
GCAGCCGCCGCATTGCATCAGCCATGATGGATACTTTCTCGGCAGGAGCAAGGTGAGATGACAGGAGATC
CTGCCCCGGCACTTCGCCCAATAGCAGCCAGTCCCTTCCCGCTTCAGTGACAACGTCGAGCACAGCTGCG
CAAGGAACGCCCGTCGTGGCCAGCCACGATAGCCGCGCTGCCTCGTCCTGCAGTTCATTCAGGGCACCGG
ACAGGTCGGTCTTGACAAAAAGAACCGGGCGCCCCTGCGCTGACAGCCGGAACACGGCGGCATCAGAGCA
GCCGATTGCCTGTTGTGCCCAGTCATAGCCGAATAGCCTCTCCACCCAAGCGGCCGGAGAACCTGCGTGC
AATCCATCTTGTTCAATGGCCGATCCCATAACACCCCTTGTATTACTGTTTATGTAAGCAGACAGTTTTA
CTGTTCGTGATGATATATTTTTATCTTGTGCAATGTAACAGGTTGTGGCCATAGCGGGCCCGGGATTTTC
CTCCACGTCCCCGCATGTTAGAAGACTTCCCCTGCCCTCGGCTCTGGAAGTTCCTATACTTTCTAGAGAA
TAGGAACTTCCCGCCAGAATGCGTTCGCACAGCCGCCAGCCGGTCACTCCGTTGATGGTTACTCGGAACA
GCAGGGAGCCGTCGGGGTTGATCAGGCGCTCGTCGATAATTTTGTTGCCGTTCCACAGGGTCCCTGTTAC
AGTGATCTTTTTGCCGTCGAACACGGCGATGCCTTCATACGGCCGTCCGAAATAGTCGATCATGTTCGGC
GTAACCCCGTCGATTACCAGTGTGCCATAGTGCAGGATCACCTTAAAGTGATGATCATCCACAGGGTACA
CCACCTTAAAAATTTTTTCGATCTGGCCCATTTGGTCGCCGCTCAGACCTTCATACGGGATGATGACATG
GATGTCGATCTTCAGCCCATTTTCACCGCTCAGGACAATCCTTTGGATCGGAGTTACGGACACCCCGAGA
TTCTGAAACAAACTGGACACACCTCCCTGTTCAAGGACTTGGTCCAGGTTGTAGCCGGCTGTCTGTCGCC
AGTCCCCAACGAAATCTTCGAGTGTGAAGACCATGGATCCGGGCCCGGGGTTTTCTTCAACGTCTCCAGC
CTGCTTCAGCAGGCTGAAGTTAGTAGCTCCGCTTCCTCGAGCTCGAGATCTGGCGAAGGCGATGGGGGTC
TTGAAGGCGTGCTGGTACTCCACGATGCCCAGCTCGGTGTTGCTGTGCAGCTCCTCCACGCGGCGGAAGG
CGAACATGGGGCCCCCGTTCTGCAGGATGCTGGGGTGGATGGCGCTCTTGAAGTGCATGTGGCTGTCCAC
CACGAAGCTGTAGTAGCCGCCGTCGCGCAGGCTGAAGGTGCGGGCGAAGCTGCCCACCAGCACGTTATCG
CCCATGGGGTGCAGGTGCTCCACGGTGGCGTTGCTGCGGATGATCTTGTCGGTGAAGATCACGCTGTCCT
CGGGGAAGCCGGTGCCCACCACCTTGAAGTCGCCGATCACGCGGCCGGCCTCGTAGCGGTAGCTGAAGCT
CACGTGCAGCACGCCGCCGTCCTCGTACTTCTCGATGCGGGTGTTGGTGTAGCCGCCGTTGTTGATGGCG
TGCAGGAAGGGGTTCTCGTAGCCGCTGGGGTAGGTGCCGAAGTGGTAGAAGCCGTAGCCCATCACGTGGC
TCAGCAGGTAGGGGCTGAAGGTCAGGGCGCCTTTGGTGCTCTTCATCTTGTTGGTCATGCGGCCCTGCTC
GGGGGTGCCCTCTCCGCCGCCCACCAGCTCGAACTCCACGCCGTTCAGGGTGCCGGTGATGCGGCACTCG
ATCTTCATGGCGGGCATGGTGGCGACCGGTAGCGCTAGCGGCTTCGGTACCACGCGTTCGCTCGAATTAA
TCAATTCTTTGCCAAAATGATGAGACAGCACAATAACCAGCACGTTGCCCAGGAGCTGTAGGAAAAAGAA
GAAGGCATGAACATGGTTAGCAGAGGCTCTAGAGCCGCCGGTCACACGCCAGAAGCCGAACCCCGCCCTG
CCCCGTCCCCCCCGAAGGCAGCCGTCCCCCCGCGGACAGCCCCGAGGCTGGAGAGGGAGAAGGGGACGGC
GGCGCGGCGACGCACGAAGGCCCTCCCCGCCCATTTCCTTCCTGCCGGGGCCCTCCCGGAGCCCCTCAAG
GCTTTCACGCAGCCACAGAAAAGAAACAAGCCGTCATTAAACCAAGCGCTAATTACAGCCCGGAGGAGAA
GGGCCGTCCCGCCCGCTCACCTGTGGGAGTAACGCGGTCAGTCAGAGCCGGGGCGGGCGGCGCGAGGCGG
CGCGGAGCGGGGCACGGGGCGAAGGCAACGCAGCGACTCCCGCCCGCCGCGCGCTTCGCTTTTTATAGGG
CCGCCGCCGCCGCCGCCTCGCCATAAAAGGAAACTTTCGGAGCGCGCCGCTCTGATTGGCTGCCGCCGCA
CCTCTCCGCCTCGCCCCGCCCCGCCCCTCGCCCCGCCCCGCCCCGCCTGGCGCGCGCCCCCCCCCCCCCC
CCGCCCCCATCGCTGCACAAAATAATTAAAAAATAAATAAATACAAAATTGGGGGTGGGGAGGGGGGGGA
GATGGGGAGAGTGAAGCAGAACGTGGGGCTCACCTCGACCATGGTAATAGCGATGACTAATACGTAGATG
TACTGCCAAGTAGGAAAGTCCCATAAGGTCATGTACTGGGCATAATGCCAGGCGGGCCATTTACCGTCAT
TGACGTCAATAGGGGGCGTACTTGGCATATGATACACTTGATGTACTGCCAAGTGGGCAGTTTACCGTAA
ATACTCCACCCATTGACGTCAATGGAAAGTCCCTATTGGCGTTACTATGGGAACATACGTCATTATTGAC
GTCAATGGGCGGGGGTCGTTGGGCGGTCAGCCAGGCGGGCCATTTACCGTAAGTTATGTAACGCGGAACA
ACAACAATTGCATTCATTTTATGTTTCAGGTTCAGGGGGAGGTGTGGTCCTGCGATTCCATCGAGTGCAC
CTACACCCTGCTGAAGACCCTATGCGGCCTAAGAGACCTGCTACCAATGAATTAAAAAAAAATGATTAAT
AAAAAATCACTTACTTGAAATCAGCAATAAGGTCTCTGTTGAAATTTTCTCCCAGCAGCACCTCACTTCC
CTCTTCCCAACTCTGGTATTCTAAACCCCGTTCAGCGGCATACTTTCTCCATACTTTAAAGGGGATGTCA
AATTTTAGCTCCTCTCCTGTACCCACAATCTTCATGTCTTTCTTCCCAGATGACCAAGAGAGTCCGGCTC
AGTGACTCCTTCAACCCTGTCTACCCCTATGAAGATGAAAGCACCTCCCAACACCCCTTTATAAACCCAG
GGTTTATTTCCCCAAATGGCTTCACACAAAGCCCAGACGGAGTTCTTACTTTAAAATGTTTAACCCCACT
AACAACCACAGGCGGATCTCTACAGCTAAAAGTGGGAGGGGGACTTACAGTGGATGACACTGATGGTACC
TTACAAGAAAACATACGTGCTACAGCACCCATTACTAAAAATAATCACTCTGTAGAACTATCCATTGGAA
ATGGATTAGAAACTCAAAACAATAAACTATGTGCCAAATTGGGAAATGGGTTAAAATTTAACAACGGTGA
CATTTGTATAAAGGATAGTATTAACACCTTATGGACTGGAATAAACCCTCCACCTAACTGTCAAATTGTG
GAAAACACTAATACAAATGATGGCAAACTTACTTTAGTATTAGTAAAAAATGGAGGGCTTGTTAATGGCT
ACGTGTCTCTAGTTGGTGTATCAGACACTGTGAACCAAATGTTCACACAAAAGACAGCAAACATCCAATT
AAGATTATATTTTGACTCTTCTGGAAATCTATTAACTGAGGAATCAGACTTAAAAATTCCACTTAAAAAT
AAATCTTCTACAGCGACCAGTGAAACTGTAGCCAGCAGCAAAGCCTTTATGCCAAGTACTACAGCTTATC
CCTTCAACACCACTACTAGGGATAGTGAAAACTACATTCATGGAATATGTTACTACATGACTAGTTATGA
TAGAAGTCTATTTCCCTTGAACATTTCTATAATGCTAAACAGCCGTATGATTTCTTCCAATGTTGCCTAT
GCCATACAATTTGAATGGAATCTAAATGCAAGTGAATCTCCAGAAAGCAACATAGCTACGCTGACCACAT
CCCCCTTTTTCTTTTCTTACATTACAGAAGACGACAACTAAAATAAAGTTTAAGTGTTTTTATTTAAAAT
CACAAAATTCGAGTAGTTATTTTGCCTCCACCTTCCCATTTGACAGAATACACAGTCCTTTCTCCCCGGC
TGGCCTTAAAAAGCATCATATCATGGGTAACAGACATATTCTTAGGTGTTATATTCCACACGGTTTCCTG
TCGAGCCAAACGCTCATCAGTGATATTAATAAACTCCCCGGGCAGCTCACTTAAGTTCATGTCGCTGTCC
AGCTGCTGAGCCACAGGCTGCTGTCCAACTTGCGGTTGCTTAACGGGCGGCGAAGGAGAAGTCCACGCCT
ACATGGGGGTAGAGTCATAATCGTGCATCAGGATAGGGCGGTGGTGCTGCAGCAGCGCGCGAATAAACTG
CTGCCGCCGCCGCTCCGTCCTGCAGGAATACAACATGGCAGTGGTCTCCTCAGCGATGATTCGCACCGCC
CGCAGCATAAGGCGCCTTGTCCTCCGGGCACAGCAGCGCACCCTGATCTCACTTAAATCAGCACAGTAAC
TGCAGCACAGCACCACAATATTGTTCAAAATCCCACAGTGCAAGGCGCTGTATCCAAAGCTCATGGCGGG
GACCACAGAACCCACGTGGCCATCATACCACAAGCGCAGGTAGATTAAGTGGCGACCCCTCATAAACACG
CTGGACATAAACATTACCTCTTTTGGCATGTTGTAATTCACCACCTCCCGGTACCATATAAACCTCTGAT
TAAACATGGCGCCATCCACCACCATCCTAAACCAGCTGGCCAAAACCTGCCCGCCGGCTATACACTGCAG
GGAACCGGGACTGGAACAATGACAGTGGAGAGCCCAGGACTCGTAACCATGGATCATCATGCTCGTCATG
ATATCAATGTTGGCACAACACAGGCACACGTGCATACACTTCCTCAGGATTACAAGCTCCTCCCGCGTTA
GAACCATATCCCAGGGAACAACCCATTCCTGAATCAGCGTAAATCCCACACTGCAGGGAAGACCTCGCAC
GTAACTCACGTTGTGCATTGTCAAAGTGTTACATTCGGGCAGCAGCGGATGATCCTCCAGTATGGTAGCG
CGGGTTTCTGTCTCAAAAGGAGGTAGACGATCCCTACTGTACGGAGTGCGCCGAGACAACCGAGATCGTG
TTGGTCGTAGTGTCATGCCAAATGGAACGCCGGACGTAGTCATTCTCGTATTTTGTATAGCAAAACGCGG
CCCTGGCAGAACACACTCTTCTTCGCCTTCTATCCTGCCGCTTAGCGTGTTCCGTGTGATAGTTCAAGTA
CAGCCACACTCTTAAGTTGGTCAAAAGAATGCTGGCTTCAGTTGTAATCAAAACTCCATCGCATCTAATT
GTTCTGAGGAAATCATCCACGGTAGCATATGCAAATCCCAACCAAGCAATGCAACTGGATTGCGTTTCAA
GCAGGAGAGGAGAGGGAAGAGACGGAAGAACCATGTTAATTTTTATTCCAAACGATCTCGCAGTACTTCA
AATTGTAGATCGCGCAGATGGCATCTCTCGCCCCCACTGTGTTGGTGAAAAAGCACAGCTAAATCAAAAG
AAATGCGATTTTCAAGGTGCTCAACGGTGGCTTCCAACAAAGCCTCCACGCGCACATCCAAGAACAAAAG
AATACCAAAAGAAGGAGCATTTTCTAACTCCTCAATCATCATATTACATTCCTGCACCATTCCCAGATAA
TTTTCAGCTTTCCAGCCTTGAATTATTCGTGTCAGTTCTTGTGGTAAATCCAATCCACACATTACAAACA
GGTCCCGGAGGGCGCCCTCCACCACCATTCTTAAACACACCCTCATAATGACAAAATATCTTGCTCCTGT
GTCACCTGTAGCGAATTGAGAATGGCAACATCAATTGACATGCCCTTGGCTCTAAGTTCTTCTTTAAGTT
CTAGTTGTAAAAACTCTCTCATATTATCACCAAACTGCTTAGCCAGAAGCCCCCCGGGAACAAGAGCAGG
GGACGCTACAGTGCAGTACAAGCGCAGACCTCCCCAATTGGCTCCAGCAAAAACAAGATTGGAATAAGCA
TATTGGGAACCACCAGTAATATCATCGAAGTTGCTGGAAATATAATCAGGCAGAGTTTCTTGTAGAAATT
GAATAAAAGAAAAATTTGCCAAAAAAACATTCAAAACCTCTGGGATGCAAATGCAATAGGTTACCGCGCT
GCGCTCCAACATTGTTAGTTTTGAATTAGTCTGCAAAAATAAAAAAAAAACAAGCGTCATATCATAGTAG
CCTGACGAACAGGTGGATAAATCAGTCTTTCCATCACAAGACAAGCCACAGGGTCTCCAGCTCGACCCTC
GTAAAACCTGTCATCGTGATTAAACAACAGCACCGAAAGTTCCTCGCGGTGACCAGCATGAATAAGTCTT
GATGAAGCATACAATCCAGACATGTTAGCATCAGTTAAGGAGAAAAAACAGCCAACATAGCCTTTGGGTA
TAATTATGCTTAATCGTAAGTATAGCAAAGCCACCCCTCGCGGATACAAAGTAAAAGGCACAGGAGAATA
AAAAATATAATTATTTCTCTGCTGCTGTTTAGGCAACGTCGCCCCCGGTCCCTCTAAATACACATACAAA
GCCTCATCAGCCATGGCTTACCAGAGAAAGTACAGCGGGCACACAAACCACAAGCTCTAAAGTCACTCTC
CAACCTCTCCACAATATATATACACAAGCCCTAAACTGACGTAATGGGACTAAAGTGTAAAAAATCCCGC
CAAACCCAACACACACCCCGAAACTGCGTCACCAGGGAAAAGTACAGTTTCACTTCCGCAATCCCAACAA
GCGTCACTTCCTCTTTCTCACGGTACGTCACATCCCATTAACTTACAACGTCATTTTCCCACGGCCGCGC
CGCCCCTTTTAACCGTTAACCCCACAGCCAATCACCACACGGCCCACACTTTTTAAAATCACCTCATTTA
CATATTGGCACCATTCCATCTATAAGGTATATTATTGATGATGGCCAAGCTATTTAGGTGACACTATAGA
ATACTCAAGCTATGCATCAAGCTTGGTACCGAGCTCGGATCCACTAGTAACGGCCGCCAGTGTGCTGGAA
TTCGCCCTTGTTTAAACGCGATCGCTTGAGATCGTTTTGGTCTGCGCGTAATCTCTTGCTCTGAAAACGA
AAAAACCGCCTTGCAGGGCGGTTTTTCGAAGGTTCTCTGAGCTACCAACTCTTTGAACCGAGGTAACTGG
CTTGGAGGAGCGCAGTCACCAAAACTTGTCCTTTCAGTTTAGCCTTAACCGGCGCATGACTTCAAGACTA
ACTCCTCTAAATCAATTACCAGTGGCTGCTGCCAGTGGTGCTTTTGCATGTCTTTCCGGGTTGGACTCAA
GACGATAGTTACCGGATAAGGCGCAGCGGTCGGACTGAACGGGGGGTTCGTGCATACAGTCCAGCTTGGA
GCGAACTGCCTACCCGGAACTGAGTGTCAGGCGTGGAATGAGACAAACGCGGCCATAACAGCGGAATGAC
ACCGGTAAACCGAAAGGCAGGAACAGGAGAGCGCACGAGGGAGCCGCCAGGGGGAAACGCCTGGTATCTT
TATAGTCCTGTCGGGTTTCGCCACCACTGATTTGAGCGTCAGATTTCGTGATGCTTGTCAGGGGGGCGGA
GCCTATGGAAAAACGGCTTTGCCGCGGCCCTCTCACTTCCCTGTTAAGTATCTTCCTGGCATCTTCCAGG
AAATCTCCGCCCCGTTCGTAAGCCATTTCCGCTCGCCGCAGTCGAACGACCGAGCGTAGCGAGTCAGTGA
GCGAGGAAGCGGAATATATCCTGTATCACATATTCTGCTGACGCACCGGTGCAGCCTTTTTTCTCCTGCC
ACATGAAGCACTTCACTGACACCCTCATCAGTGCCAACATAGTAAGCCAGTATACACTCCGCTAGCGCGA
TCGCTTAATTAATTTAAATCCTGCAGGGTTTAAACGGCCGGCCTAGGGATAACAGGGTAATCGTAACTAT
AACGGTCCTAAGGTAGCGAATGATGTCCGGCGGTGCTTTTGCCGTTACGCACCACCCCGTCAGTAGCTGA
ACAGGAGGGACAGCTGATAGAAACAGAAGCCACTGGAGCACCTCAAAAACACCATCATACACTAAATCAG
TAAGTTGGCAGCATCACCCGACGCACTTTGCGCCGAATAAATACCTGTGACGGAAGATCACTTCGCAGAA
TAAATAAATCCTGGTGTCCCTGTTGATACCGGGAAGCCCTGGGCCAACTTTTGGCGAAAATGAGACGTTG
ATCGGCACGTAAGAGGTTCCAACTTTCACCATAATGAAATAAGATCACTACCGGGCGTATTTTTTGAGTT
ATCGAGATTTTCAGGAGCTAAGGAAGCTAAAATGGAGAAAAAAATCACTGGATATACCACCGTTGATATA
TCCCAATGGCATCGTAAAGAACATTTTGAGGCATTTCAGTCAGTTGCTCAATGTACCTATAACCAGACCG
TTCAGCTGGATATTACGGCCTTTTTAAAGACCGTAAAGAAAAATAAGCACAAGTTTTATCCGGCCTTTAT
TCACATTCTTGCCCGCCTGATGAATGCTCATCCGGAATTCCGTATGGCAATGAAAGACGGTGAGCTGGTG
ATATGGGATAGTGTTCACCCTTGTTACACCGTTTTCCATGAGCAAACTGAAACGTTTTCATCGCTCTGGA
GTGAATACCACGACGATTTCCGGCAGTTTCTACACATATATTCGCAAGATGTGGCGTGTTACGGTGAAAA
CCTGGCCTATTTCCCTAAAGGGTTTATTGAGAATATGTTTTTCGTCTCAGCCAATCCCTGGGTGAGTTTC
ACCAGTTTTGATTTAAACGTGGCCAATATGGACAACTTCTTCGCCCCCGTTTTCACCATGGGCAAATATT
ATACGCAAGGCGACAAGGTGCTGATGCCGCTGGCGATTCAGGTTCATCATGCCGTCTGTGATGGCTTCCA
TGTCGGCAGAATGCTTAATGAATTACAACAGTACTGCGATGAGTGGCAGGGCGGGGCGTAACCTGCAGGT
TAATTAAGGAAGGGCGAATTCTGCAGATATCCATCACACTGGCGGCCGCTCGAGCATGCATCTAGAGGGC
CCAATTCGCCCTATAGTGAGTCGTATTACAATTCACTGGCC (SEQ ID NO: 177)
The nucleotide sequence of pHCA-Dual2-FI-globin-mgmtGFP:
GGCCGAAGGATTACATGAGCTTAGAAATGTAATTAGCATAGTGTGTGGCATAGTGTAGATACCAAATAAA
TATGATCTCTCCTTCTACTCTTGAAAATGCAAACACATTCTTGGTGGTCCTAAAATAGCCTGTAACATGG
TTTACTCAGCAGCATTTGCTATTCAAGGCAGATCTGCCTTTAGTCATTGGCTGCGCTCCTGAACAGCTGT
GTGAAAGGCTAACTTTTGTAAACCAAATCAAAATAAAATGCAGCAAAAATTTGTCACTGAAAGGAAATCC
TCAGTATATCCTTTTATGAAATGAAAGATCCCTCATCCAAACTTAACTTTTTTAAAAGTGCGCATTTGGA
GATATAGCCCTTTCTTATGAATCCTAATTCAATTTTGGCCATAAACACACGTTGATGTTCCCCACCCCAA
AGCACATAGCAACAAGAGTAGGTTCTATATTGAAAATAATGACAATTTAAAAACATGTACTTATTTCACT
GTATGTGGACAGTGTCTATGATTGCATCATGAAGTGTCATATAACCATGTACGTGTACATGAGAGAGAGA
TAGAGAGAGAAGTGGTAGGGTGGTGGTGGTAGAGGGGATGGCGATAGTAATCATGGTAATGGTAGAGGTG
ATGGAGGTGGTAATGACGGAGGTAAGGGTGGTAGTGATGATGGTGGTGGTGGTAATGGTGGTGGATGTGG
TGGTGGCAATTGGGATGGTGGGATGGTGGTAGCCATGGTGATGGTGGTAATGGTGTTGATTTAAAGGGTG
GTGGTAGTGAAGGTGAGGGTAGTGGTGGTGGAGGTGGTGGTGCTGGTAGCAATAGTGATGGTGGTGATGG
TGTTGATGAGGGTGTTGGGATCAGGGTGAGTTCCCACAGTATATTTCATTCTTGTTGTACCACTCTGTCA
ACAGCACCACTGACTGGGACAGAGGAAGAAGGCACACTCTGAATGTGTTATTAACAGAAACCTCAAAACA
GTCTGTCTCCTTGTAGTCATTCAAAATTATCTTTTTCTTACCTGGAAAACTGAAACTGAATTACCGGGAA
AAACACAGGAGATTTTTGTTTGTTAATATGCTGCCAATAAAGTAATTTTATGTCAAATTTAACTACAGGA
AAGGGCAAGGCATTTTCTAAGTTCCTTAGATGTCATGTGGCTAAAAAAAACAAAAGGATGGACAGCAGTT
AGATACTGTACACTTAGCTGTTTGAAGCCATATATTCAGAAAGCAGATGTTGGGAGTTGGTGTTTGAGGA
CTGATTTCCTGGAGGTATTTTATATAGGCCAAGTTCATTGTTCTAAACTCTAAGGGCTTGACTTGAGGGA
GGAAAAGAGGCAAGAACATGTTTAGTTTTGCTGACAGCATCACATGGGCAGCCCTAAGGCTAGACAACTT
TAGGGCCTGAAGCTTATTCTAGGAAAGAAGCACCTACAGAGTGGCACTGGGCTCCCCTCCACTATAGAGA
TGAAGTCATATGACAGTAAAGGGCAGGCAGGGCTGCCTAGGGGGCCCAGAACTGACACTTCCATTAGAAT
GAGCACAGGCCAGGGAGAGAAGTGGGGAACCAGAGAGAAGGAGCTGGAATTCCTTTCTCTCCATACATAA
ATGCCTGCAGAGTCCCATTTCAGAATCCGGCAGACAAAGCCACCAATGTGATCCCCATGACCTTATAAAC
ATTCATTAAAATGCATTTCAAGGCATGTGATGGCCTCCCCACCCCCTAGATAATGAGAAAACAAAGGTTT
CTCTTCTGATAGAGACAAGTTCAGCTCTGAAGTCAACATTATTTCTGGTTCTGTCTGAACAATGACATAT
GGCAACTCTTCCCTTTCTATAGTTCTAGTCCAGAATGACAAAAAAGGGGAAAAATTTCTTAGAGAAGGTA
GAGATTATACGAATACAGTCCATGAAATGAGCATAAGGAGAATAAAGAATATAACTTATCCAAAGAAGTC
TGGCAGGCTGTTATAAATGCTTGATTTTGGACACTGTAGTTGGAGGTTTAACATGGACACCAATAAAAAG
GTCAGCAAAGGGTATGCACTGTTCCTATTGGGCAAGAAGATAGGAGGTCAAAGGTAACCAGGAAAGATAA
ACTCAGGGAGACTTATTTTCCCTCCAGAGGGCACTGGGCTTGTAGGCCCTGGGCAAAATTGTCAAAAAGG
TGAAAATCGCCTGTGGTTTATTTAGTCTGCTCTTTCTTCACTAGTGCCTCACCAGTTCAGTTCAGGCCAA
TTTGCTAGCTACCACATTTGTAGAGGTTTTACTTGCTTTAAAAAACCTCCCACACCTCCCCCTGAACCTG
AAACATAAAATGAATGCAATTGTTGTTGTTAACTTGTTTATTGCAGCTTATAATGGTTACAAATAAAGCA
ATAGCATCACAAATTTCACAAATAAAGCATTTTTTTCACTGCATTCTAGTTGTGGTTTGTCCAAACTCAT
CAATGTATCTTATCATGTCTGAAGCTTTCTAGGTATTGAATAAGAAAAATGAAGTTAAGGTGGTTGATGG
TAACACTATGCTAATAACTGCAGAGCCAGAAGCACCATAAGGGACATGATAAGGGAGCCAGCAGACCTCT
GATCTCTTCCTGAATGCTAATCTTAAACATCCTGAGGAAGAATGGGACTTCCATTTGGGGTGGGCCTATG
ATAGGGTAATAAGACAGTAGTGAATATCAAGCTACAAAAAGCCCCCTTTCAAATTCTTCTCAGTCCTAAC
TTTTCATACTAAGCCCAGTCCTTCCAAAGCAGACTGTGAAAGAGTGATAGTTCCGGGAGACTAGCACTGC
AGATTCCGGGTCACTGTGAGTGGGGGAGGCAGGGAAGAAGGGCTCACAGGACAGTCAAACCATGCCCCCT
GTTTTTCCTTCTTCAAGTAGACCTCTATAAGACAACAGAGACAACTAAGGCTGAGTGGCCAGGCGAGGAG
AAACCATCTCGCCGTAAAACATGGAAGGAACACTTCAGGGGAAAGGTGGTATCTCTAAGCAAGAGAACTG
AGTGGAGTCAAGGCTGAGAGATGCAGGATAAGCAAATGGGTAGTGAAAAGACATTCATGAGGACAGCTAA
AACAATAAGTAATGTAAAATACAGCATAGCAAAACTTTAACCTCCAAATCAAGCCTCTACTTGAATCCTT
TTCTGAGGGATGAATAAGGCATAGGCATCAGGGGCTGTTGCCAATGTGCATTAGCTGTTTGCAGCCTCAC
CTTCTTTCATGGAGTTTAAGATATAGTGTATTTTCCCAAGGTTTGAACTAGCTCTTCATTTCTTTATGTT
TTAAATGCACTGACCTCCCACATTCCCTTTTTAGTAAAATATTCAGAAATAATTTAAATACATCATTGCA
ATGAAAATAAATGTTTTTTATTAGGCAGAATCCAGATGCTCAAGGCCCTTCATAATATCCCCCAGTTTAG
TAGTTGGACTTAGGGAACAAAGGAACCTTTAATAGAAATTGGACAGCAAGAAAGCGAGCTTAGTGATACT
TGTGGGCCAGGGCATTAGCCACACCAGCCACCACTTTCTGATAGGCAGCCTGCACTGGTGGGGTGGCGGC
CGCCCTAGGATTATGGCACTGGTAGAATTCACTACTTATGGCACTGGTAGAATTCACTACTTATGGCACT
GGTAGAATTCACTACTTATGGCACTGGTAGAATTCACTATCGTTGTGCTTGATCTAACCATGTTTCATTG
TGCTTGATCTAACCATGTTTCATTGTGCTTGATCTAACCATGTTTCATTGTGCTTGATCTAACCATGTAT
CGCCCGGGGGCGGCCGCACACAAAAAACCAACACACAGATCTAATGAAAATAAAGATCTTTTATTGAATT
CTTAGCTGGCCTCCACCTTTCTCTTCTTCTTGGGGCTGTCGCCTCCCAGCTGAGACAGGTCGATCCGTGT
CTCGTACAGGCCGGTGATGCTCTGGTGGATCAGGGTGGCGTCCAGCACCTCTTTGGTGCTGGTGTACCTC
TTCCGGTCGATGGTGGTGTCAAAGTACTTGAAGGCGGCAGGGGCTCCCAGATTGGTCAGGGTAAACAGGT
GGATGATATTCTCGGCCTGCTCTCTGATGGGCTTATCCCGGTGCTTGTTGTAGGCGGACAGCACTTTGTC
CAGATTAGCGTCGGCCAGGATCACTCTCTTGGAGAACTCGCTGATCTGCTCGATGATCTCGTCCAGGTAG
TGCTTGTGCTGTTCCACAAACAGCTGTTTCTGCTCATTATCCTCGGGGGAGCCCTTCAGCTTCTCATAGT
GGCTGGCCAGGTACAGGAAGTTCACATATTTGGAGGGCAGGGCCAGTTCGTTTCCCTTCTGCAGTTCGCC
GGCAGAGGCCAGCATTCTCTTCCGGCCGTTTTCCAGCTCGAACAGGGAGTACTTAGGCAGCTTGATGATC
AGGTCCTTTTTCACTTCTTTGTAGCCCTTGGCTTCCAGAAAGTCGATGGGATTCTTCTCGAAGCTGCTTC
TTTCCATGATGGTGATCCCCAGCAGCTCTTTCACACTCTTCAGTTTCTTGGACTTGCCCTTTTCCACTTT
GGCCACCACCAGCACAGAATAGGCCACGGTGGGGCTGTCGAAGCCGCCGTACTTCTTAGGGTCCCAGTCC
TTCTTTCTGGCGATCAGCTTATCGCTGTTCCTCTTGGGCAGGATAGACTCTTTGCTGAAGCCGCCTGTCT
GCACCTCGGTCTTTTTCACGATATTCACTTGGGGCATGCTCAGCACTTTCCGCACGGTGGCAAAATCCCG
GCCCTTATCCCACACGATCTCCCCGGTTTCGCCGTTTGTCTCGATCAGAGGCCGCTTCCGGATCTCGCCG
TTGGCCAGGGTAATCTCGGTCTTGAAAAAGTTCATGATGTTGCTGTAGAAGAAGTACTTGGCGGTAGCCT
TGCCGATTTCCTGCTCGCTCTTGGCGATCATCTTCCGCACGTCGTACACCTTGTAGTCGCCGTACACGAA
CTCGCTTTCCAGCTTAGGGTACTTTTTGATCAGGGCGGTTCCCACGACGGCGTTCAGGTAGGCGTCGTGG
GCGTGGTGGTAGTTGTTGATCTCGCGCACTTTGTAAAACTGGAAATCCTTCCGGAAATCGGACACCAGCT
TGGACTTCAGGGTGATCACTTTCACTTCCCGGATCAGCTTGTCATTCTCGTCGTACTTAGTGTTCATCCG
GGAGTCCAGGATCTGTGCCACGTGCTTTGTGATCTGCCGGGTTTCCACCAGCTGTCTCTTGATGAAGCCG
GCCTTATCCAGTTCGCTCAGGCCGCCTCTCTCGGCCTTGGTCAGATTGTCGAACTTTCTCTGGGTAATCA
GCTTGGCGTTCAGCAGCTGCCGCCAGTAGTTCTTCATCTTCTTCACGACCTCTTCGGAGGGCACGTTGTC
GCTCTTGCCCCGGTTCTTGTCGCTTCTGGTCAGCACCTTGTTGTCGATGGAGTCGTCCTTCAGAAAGCTC
TGAGGCACGATATGGTCCACATCGTAGTCGGACAGCCGGTTGATGTCCAGTTCCTGGTCCACGTACATAT
CCCGCCCATTCTGCAGGTAGTACAGGTACAGCTTCTCGTTCTGCAGCTGGGTGTTTTCCACGGGGTGTTC
TTTCAGGATCTGGCTGCCCAGCTCTTTGATGCCCTCTTCGATCCGCTTCATTCTCTCGCGGCTGTTCTTC
TGTCCCTTCTGGGTGGTCTGGTTCTCTCTGGCCATTTCGATCACGATGTTCTCGGGCTTGTGCCGGCCCA
TCACTTTCACGAGCTCGTCCACCACCTTCACTGTCTGCAGGATGCCCTTCTTAATGGCGGGGCTGCCGGC
CAGATTGGCAATGTGCTCGTGCAGGCTATCGCCCTGGCCGGACACCTGGGCTTTCTGGATGTCCTCTTTA
AAGGTCAGGCTGTCGTCGTGGATCAGCTGCATGAAGTTTCTGTTGGCGAAGCCGTCGGACTTCAGGAAAT
CCAGGATTGTCTTGCCGGACTGCTTGTCCCGGATGCCGTTGATCAGCTTCCGGCTCAGCCTGCCCCAGCC
GGTGTATCTCCGCCGCTTCAGCTGCTTCATCACTTTGTCGTCGAACAGGTGGGCATAGGTTTTCAGCCGT
TCCTCGATCATCTCTCTGTCCTCAAACAGTGTCAGGGTCAGCACGATATCTTCCAGAATGTCCTCGTTTT
CCTCATTGTCCAGGAAGTCCTTGTCCTTGATAATTTTCAGCAGATCGTGGTATGTGCCCAGGGAGGCGTT
GAACCGATCTTCCACGCCGGAGATTTCCACGGAGTCGAAGCACTCGATTTTCTTGAAGTAGTCCTCTTTC
AGCTGCTTCACGGTCACTTTCCGGTTGGTCTTGAACAGCAGGTCCACGATGGCCTTTTTCTGCTCGCCGC
TCAGGAAGGCGGGCTTTCTCATTCCCTCGGTCACGTATTTCACTTTGGTCAGCTCGTTATACACGGTGAA
GTACTCGTACAGCAGGCTGTGCTTGGGCAGCACCTTCTCGTTGGGCAGGTTCTTATCGAAGTTGGTCATC
CGCTCGATGAAGCTCTGGGCGGAAGCGCCCTTGTCCACCACTTCCTCGAAGTTCCAGGGGGTGATGGTTT
CCTCGCTCTTTCTGGTCATCCAGGCGAATCTGCTGTTTCCCCTGGCCAGAGGGCCCACGTAGTAGGGGAT
GCGGAAGGTCAGGATCTTCTCGATCTTTTCCCGGTTGTCCTTCAGGAATGGGTAAAAATCTTCCTGCCGC
CGCAGAATGGCGTGCAGCTCTCCCAGGTGGATCTGGTGGGGGATGCTGCCGTTGTCGAAGGTCCGCTGCT
TCCGCAGCAGGTCCTCTCTGTTCAGCTTCACGAGCAGTTCCTCGGTGCCGTCCATCTTTTCCAGGATGGG
CTTGATGAACTTGTAGAACTCTTCCTGGCTGGCTCCGCCGTCAATGTAGCCGGCGTAGCCGTTCTTGCTC
TGGTCGAAGAAAATCTCTTTGTACTTCTCAGGCAGCTGCTGCCGCACGAGAGCTTTCAGCAGGGTCAGGT
CCTGGTGGTGCTCGTCGTATCTCTTGATCATAGAGGCGCTCAGGGGGGCCTTGGTGATCTCGGTGTTCAC
TCTCAGGATGTCGCTCAGCAGGATGGCGTCGGACAGGTTCTTGGCGGCCAGAAACAGGTCGGCGTACTGG
TCGCCGATCTGGGCCAGCAGGTTGTCCAGGTCGTCGTCGTAGGTGTCCTTGCTCAGCTGCAGTTTGGCAT
CCTCGGCCAGGTCGAAGTTGCTCTTGAAGTTGGGGGTCAGGCCCAGGCTCAGGGCAATCAGGTTGCCGAA
CAGGCCATTCTTCTTCTCGCCGGGCAGCTGGGCGATCAGATTTTCCAGCCGTCTGCTCTTGCTCAGTCTG
GCAGACAGGATGGCCTTGGCGTCCACGCCGCTGGCGTTGATGGGGTTTTCCTCGAACAGCTGGTTGTAGG
TCTGCACCAGCTGGATGAACAGCTTGTCCACGTCGCTGTTGTCGGGGTTCAGGTCGCCCTCGATCAGGAA
GTGGCCCCGGAACTTGATCATGTGGGCCAGGGCCAGATAGATCAGCCGCAGGTCGGCCTTGTCGGTGCTG
TCCACCAGTTTCTTTCTCAGGTGGTAGATGGTGGGGTACTTCTCGTGGTAGGCCACCTCGTCCACGATGT
TGCCGAAGATGGGGTGCCGCTCGTGCTTCTTATCCTCTTCCACCAGGAAGGACTCTTCCAGTCTGTGGAA
GAAGCTGTCGTCCACCTTGGCCATCTCGTTGCTGAAGATCTCTTGCAGATAGCAGATCCGGTTCTTCCGT
CTGGTGTATCTTCTTCTGGCGGTTCTCTTCAGCCGGGTGGCCTCGGCTGTTTCGCCGCTGTCGAACAGCA
GGGCTCCGATCAGGTTCTTCTTGATGCTGTGCCGGTCGGTGTTGCCCAGCACCTTGAATTTCTTGCTGGG
CACCTTGTACTCGTCGGTGATCACGGCCCAGCCCACAGAGTTGGTGCCGATGTCCAGGCCGATGCTGTAC
TTCTTGTCGGACGCTTCGACCTTGCGCTTTTTCTTCGGCGAAGCGTAATCTGGAACATCGTATGGGTACA
TGGTGGCCCTAGGATCGATTACTAGCTCACGACACCTGAAATGGAAGAAAAAAACTTTGAACCACTGTCT
GAGGCTTGAGAATGAACCAAGATCCAAACTCAAAAAGGGCAAATTCCAAGGAGAATTACATCAAGTGCCA
AGCTGGCCTAACTTCAGTCTCCACCCACTCAGTGTGGGGAAACTCCATCGCATAAAACCCCTCCCCCCAA
CCTAAAGACGACGTACTCCAAAAGCTCGAGAACTAATCGAGGTGCCTGGACGGCGCCCGGTACTCCGTGG
AGTCACATGAAGCGACGGCTGAGGACGGAAAGGCCCTTTTCCTTTGTGTGGGTGACTCACCCGCCCGCTC
TCCCGAGCGCCGCGTCCTCCATTTTGAGCTCCCTGCAGCAGGGCCGGGAAGCGGCCATCTTTCCGCTCAC
GCAACTGGTGCCGACCGGGCCAGCCTTGCCGCCCAGGGCGGGGCGATACACGGCGGCGCGAGGCCAGGCA
CCAGAGCAGGCCGGCGAGCTTGAGACTACCCCCGTCCGATTCTCGGTGGCCGCGCTCGCAGGCCCCGCCT
CGCCGAACATGTGCGCTGGGACGCACGGGCCCCGTCGCCGCCCGCGGCCCCAAAAACCGAAATACCAGTG
TGCAGATCTTGGCCCGCATTTACAAGACTATCTTGCCAGAAAAAAAGCGTCGCAGCAGGTCATCAAAAAT
TTTAAATGGCTAGAGACTTATCGAAAGCAGCGAGACAGGCGCGAAGGTGCCACCAGATTCGCACGCGGCG
GCCCCAGCGCCCAGGCCAGGCCTCAACTCAAGCACGAGGCGAAGGGGCTCCTTAAGCGCAAGGCCTCGAA
CTCTCCCACCCACTTCCAACCCGAAGCTCGGGATCAAGAATCACGTACTGCAGCCAGGGGCGTGGAAGTA
ATTCAAGGCACGCAAGGGCCATAACCCGTAAAGAGGCCAGGCCCGCGGGAACCACACACGGCACTTACCT
GTGTTCTGGCGGCAAACCCGTTGCGAAAAAGAACGTTCACGGCGACTACTGCACTTATATACGGTTCTCC
CCCACCCTCGGGAAAAAGGCGGAGCCAGTACACGACATCACTTTCCCAGTTTACCCCGCGCCACCTTCTC
TAGGCACCGGTTCAATTGCCGACCCCTCCCCCCAACTTCTCGGGGACTGTGGGCGATGTGCGCTCTGCCC
ACTGACGGGCACCGGAGCCTCACGCATGCTCTTCTCCACCTCAGTGATGACGAGAGCGGGCGGGTGAGGG
GGCGGGAACGCAGCGATCTCTGGGTTCTACGTTAGTGGGAGTTTAACGACGGTCCCTGGGATTCCCCAAG
GCAGGGGCGAGTCCTTTTGTATGAATTACTCAAATCGATTAGGATCCGGCGCGCCCACCGCGGAAAAAAA
GCACCGACTCGGTGCCACTTTTTCAAGTTGATAACGGACTAGCCTTATTTTAACTTGCTATTTCTAGCTC
TAAAACGTGATAAAAGCAACTGTTAGCGGTGTTTCGTCCTTTCCACAAGATATATAAAGCCAAGAAATCG
AAATACTTTCAAGTTACGATAAGCATATGATAGTCCATTTTAAAACATAATTTTAAAACTGCAAACTACC
CAAGAAATTATTACTTTCTACGTCACGTATTTTGTACTAATATCTTTGTGTTTACAGTCAAATTAATTCC
AATTATCTCTCTAACAGCCTTGTATCGTATATGCAAATATGAAGGAATCATGGGAAATAGGCCCTCGGCG
CGCCCACCGCGGAAAAAAAGCACCGACTCGGTGCCACTTTTTCAAGTTGATAACGGACTAGCCTTATTTT
AACTTGCTATTTCTAGCTCTAAAACTGACCAATAGCCTTGACAAGCGGTGTTTCGTCCTTTCCACAAGAT
ATATAAAGCCAAGAAATCGAAATACTTTCAAGTTACGGTAAGCATATGATAGTCCATTTTAAAACATAAT
TTTAAAACTGCAAACTACCCAAGAAATTATTACTTTCTACGTCACGTATTTTGTACTAATATCTTTGTGT
TTACAGTCAAATTAATTCTAATTATCTCTCTAACAGCCTTGTATCGTATATGCAAATATGAAGGAATCAT
GGGAAATAGGCCCTCGGATCCTTAATTGCTAGCGAGGCCTGTACTCTGTTTTCACAGGAAGAAATCCTCA
CCCAGTCTTCCCCAAACACATTCCCAGGTTCTGTCATTAGTGGGATAGAGATGATTACTGTGGGGAGAAG
AGAAACATCTGGATGGATTTGGTGAGGTTGATCTATAGAGGAAGTAGGTGCTGCCTGAGGTAGCTGTAAT
AGAAGCTAAAGGTCAAAGGAGAGGGCCCTGTCCCAATCCAGATGACTCCACTTCTGCTGGACCCAGGTTC
ACAAGCTTAATCTACATTTCACCTAAATTTGGCTAACAAGCCCAAAATCACACAGGCAAAGGGAGAAGTG
GAGGCAGAACCGAGGTTGGAGGCCACCAGGGCCACCGGGCAGAGATCATTTAAGCCCAACCTTCTCACTT
CTCCCTGGGCTCTGCCTCTCTTAAAGGACCTTGTGGTGTGACCTCTTGTAGGTCCCTTTCACACTCGGGG
CCTCAGTTTCCCCACTGTAAAGTGAATGGGTCCCAGCTTTGGTAAGCTTATGCTTACCTGATGCTTTCTT
CCTGGGCTGCTCTTGTAGAGAAAAGATAAATCTTCTTCCTCCATCCACGAGGGCTTCTTTCCCTGGGGGT
GAGAGTAGGCTGAGGAGAGCCACTTGCACACACTCTTAAAGAAAGTATTACCTGCACCAGCTCAGTGAGA
GGCACAGATCAGACTGTTACTTGAATCAAATTATGAGCCTCCCCAAATATATCTATGACATTTAAATAGG
GGATTACTTGAACATAGACTTTGGGATCCGGTGTGGAGTGCAGGAGACTAGCAAAGTGAATCCTGAGAGT
AGCAGGTCTGCACCTGTTGGATCGAGAAAGGCGGCCTACAATTCTGGTCAAATGAGCTGTGCTTATTGAC
ATATTCTATTAGAGAGTACTACCAGGTCACCAGTCACCAGAAAGGCTGCCAGCTCTCCAACCACCTCCAG
GGAACTATCCTGAATGGGGCCTTAACAAGCCTAAGAGAGGGTTGGTTTGGGTCCCAAGCCAATATTTGCT
CTGCTTTATGTCAGTCATATGGAACCCAAACCAACCCTCTCCTATGTGCCTCACCAGTCGGTGCAGGGAT
CCCAATTTCAAGTTTGGTTTTTTATGGTCAAAGTCCAGCATAGATTAAATGAAGGGGTGTGATGATGGTG
TTAAAAGAGAACTCCAGACCAGTTTAACTCTTGGACACACATCCCATCTCACCATGGTGCTTCCAACCTT
CCAGAGATGATGGGCTCCTATTTTCTGATGACAAAGCCCTCCACAGGATTGCTGCCTGGCCATCAGGGAG
TGCCTCTGTAACTGAGGCTGAGATCCCACTTTCAGTCCTCCAGCTGTGGCCCATCCCTGCTCCGCCCACC
GGGTATGGCCTGTCCTAGGCTCTTAGGTATGGCTGCATTGTGAAATGATGGCTACAGAGCTGGCATCTCC
TGTAGTCTGGTTCATCTAGTGCACTACCTCATAGTTAAAAGAAATCTGTTTAAGCCACTGAGGGTGGCTC
CTAGTGCCAACTCCAAGAACAGGAAGCTTCCCTTTTTTGGGAGGAGGGGCAGATGGTAACATGGATCGTC
CAGGTCAATGGGAGCAGGGCAACCACAGTAAGTACTGGACAACAACACAAAACTCCATGTGTGGCTTCCA
TCGAGTCCCTCTCCAATTGGTTTGGTCTTCTCCGTCCCATGCAGCACTTTAGCAAGGGGCCTGGCTGAAG
GCTATGAATTGTGTGGAGCCTCCTCATTGCAGTCTCCAACCATCTGATGCTGGGAAAATGTCACCAGGAT
GCAGCCATGCCGTGTGGCCAATGAACCGAGAAAACACCCCTTTTCTAGAATGCTCTAAAGAGGCAGAATA
ATCCAGAGGTGAGGAAGGAAATACTCCACCAGAGACCCAGGCAGTTCCTACAAAAGCCAGACTTTCCTTC
ACCTAGGGAGTGACAAGACCAGTGGAAAACACTCTCAAGCAGTAACCCCCAAATGCTCTGCAAGCCAGTG
GCGTCCAGATACCGCACAAGCGAGTGGGCTGTCTAATCCCATCATCATGATGTAAATATCTCTAGGCTGC
CCCGGGCTGTGCCTGACCCTGTCTTCAGCTTTCCACACCTCCACCTACAGCCCATGCACAGAAGGACCAC
CCAGGAATGCTGCAAGTGTGGCACCTCCAGGGCCACCCAGGGAGAAGGAGGGCAGCTATGCTGGTGGCTC
CAGGCCCATTTGGCGGGTGGTACCTTCACACCACAAAGCCCAAACTGAGGCCCCAGATTTGGCTGATGAG
GGCATATTGGACAGGGGTCACTTATGCTCTTCCCCATTGCCACCTGGCCTCTGGCTACCTGGACTTGGCT
ACCTGTGGATCCTCTCACAGGTGCCACCATCTTGGCTGAGTCTCCAGATGCGAGGTCCCTGAGGCAGTGG
CAGGCTTCTCGCTAATGCTGATGGGATTAGGAATGGGATAGGTGGGGAGGGCCCTGGACTGGGCCCTGAT
GAGCCAAGTGGGTTTTTAGAGGGGCTACTGGTACATTTCAGGGACAGGACATCTGGTAGAGCTAAGCTGG
GGCAATAAGGAGCCACTGCTAATCTGAGAGCTAGAAACAATCAGCTTCTGGGTCATTATTAATTAGGGTA
GTTTGGGCTGTGTGGAAGTCACGTACTATATGGGGTAGCCACAGCTCTCTCTACAGATAATCTCTAAGAC
TTCTGATTGGGACCGTGTGAATGCAGTAGCAATATCTCTTCTTACTGCCAGGCCCTGCCAGTCCTGCCTC
CACGCCCTGGCTGGCCCCCCTTATGATCTGACCCATGCCAGGCTGCCATAGTATGTTACTTCTGCATTAG
CACTCCTTGGGACCTGCCTCTCCACTGTCCCTCAGACTTTAAAGAACTATACAAACCCAAGGGGCTCTTC
CCAAGAGAATTGATATGACTTGAGGTGATTCCATTTCTGGAAGTAGTCACTCCATTTTCTGCCTCACTCT
TTCAGTGCTTCACAGAGCAGGTTCGATTAAGCACACAGATTAATTAAGCACACAGATTAATCGTAACTAT
AACGGTCCTAAGGTAGCGAAAGCTTGCATGCCTGCAGGTCGACTCTAGAGGATCAAACCTAGCCACCGCG
GTGGCGGCCGGCTAGCCGGCTAGCCGGCTAGCCCTAGAACTAGTAACGGCCGCCAGTGTGCTGGAATTCG
GCTTGTAAGGTACCGGTGAAGTTCCTATACTTTCTAGAGAATAGGAACTTCGGAATAGGAACTTCTACCT
AGATGCATGCTCGAGCGGCCCCTACAGTTGAAGTCGGAAGTTTACATACACTTAAGTTGGAGTCATTAAA
ACTCGTTTTTCAACTACTCCACAAATTTCTTGTTAACAAACAATAGTTTTGGCAAGTCAGTTAGGACATC
TACTTTGTGCATGACACAAGTCATTTTTCCAACAATTGTTTACAGACAGATTATTTCACTTATAATTCAC
TGTATCACAATTCCAGTGGGTCAGAAGTTTACATACACTAAGTTGACTGTGCCTTTAAACAGCTTGGAAA
ATTCCAGAAAATGATGTCATGGCTTTAGAAGCTTCTGATAGACTAATTGACATCATTTGAGTCAATTGGA
GGTGTACCTGTGGATGTATTTCAAGGAATTCTGTGGAATGTGTGTCAGTTAGGGTGTGGAAAGTCCCCAG
GCTCCCCAGCAGGCAGAAGTATGCAAAGCATGCATATCGATACTAGTTTATAAGATCTCGAGCTAGGGTA
CCGTCAAGGCTGCAGTGAGACATGATCTTGCCACTGCACTCCAGCCTGGACAGCAGAGTGAAACCTTGCC
TCACGAAACAGAATACAAAAACAAACAAACAAAAAACTGCTCCGCAATGCGCTTCCTTGATGCTCTACCA
CATAGGTCTGGGTACTTTGTACACATTATCTCATTGCTGTTCATAATTGTTAGATTAATTTTGTAATATT
GATATTATTCCTAGAAAGCTGAGGCCTCAAGATGATAACTTTTATTTTCTGGACTTGTAATAGCTTTCTC
TTGTATTCACCATGTTGTAACTTTCTTAGAGTAGTAACAATATAAAGTTATTGTGAGTTTTTGCAAACAC
AGCAAACACAACGACCCATATAGACATTGATGTGAAATTGTCTATTGTCAATTTATGGGAAAACAAGTAT
GTACTTTTTCTACTAAGCCATTGAAACAGGAATAACAGAACAAGATTGAAAGAATACATTTTCCGAAATT
ACTTGAGTATTATACAAAGACAAGCACGTGGACCTGGGAGGAGGGTTATTGTCCATGACTGGTGTGTGGA
GACAAATGCAGGTTTATAATAGATGGGATGGCATCTAGCGCAATGACTTTGCCATCACTTTTAGAGAGCT
CTTGGGGACCCCAGTACACAAGAGGGGACGCAGGGTATATGTAGACATCTCATTCTTTTTCTTAGTGTGA
GAATAAGAATAGCCATGACCTGAGTTTATAGACAATGAGCCCTTTTCTCTCTCCCACTCAGCAGCTATGA
GATGGCTTGCCCTGCCTCTCTACTAGGCTGACTCACTCCAAGGCCCAGCAATGGGCAGGGCTCTGTCAGG
GCTTTGATAGCACTATCTGCAGAGCCAGGGCCGAGAAGGGGTGGACTCCAGAGACTCTCCCTCCCATTCC
CGAGCAGGGTTTGCTTATTTATGCATTTAAATGATATATTTATTTTAAAAGAAATAACAGGAGACTGCCC
AGCCCTGGCTGTGACATGGAAACTATGTAGAATATTTTGGGTTCCATTTTTTTTTCCTTCTTTCAGTTAG
AGGAAAAGGGGCTCAGGATCCACTTGCCCAGTGTTCTTCCTTAGTTCCTACCTTCGACCTTGATCCTCCT
TTATCTTCCTGAACCCTGCTGAGATGATCTATGTGGGGAGAATGGCTTCTTTGAGAAACATCTTCTTCGT
TAGTGGCCTGCCCCTCATTCCCACTTTAATATCCAGAATCACTATAAGAAGAATATAATAAGAGGAATAA
CTCTTATTATAGGTAAGGGAAAATTAAGAGGCATACGTGATGGGATGAGTAAGAGAGGAGAGGGAAGGAT
TAATGGACGATAAAATCTACTACTATTTGTTGAGACCTTTTATAGTCTAATCAATTTTGCTATTGTTTTC
CATCCTCACGCTAACTCCATAAAAAAACACTATTATTATCTTTATTTTGCCATGACAAGACTGAGCTCAG
AAGAGTCAAGCATTTGCCTAAGGTCGGACATGTCAGAGGCAGTGCCAGACCTATGTGAGACTCTGCAGCT
ACTGCTCATGGGCCCTGTGCTGCACTGATGAGGAGGATCAGATGGATGGGGCAATGAAGCAAAGGAATCA
TTCTGTGGATAAAGGAGACAGCCATGAAGAAGTCTATGACTGTAAATTTGGGAGCAGGAGTCTCTAAGGA
CTTGGATTTCAAGGAATTTTGACTCAGCAAACACAAGACCCTCACGGTGACTTTGCGAGCTGGTGTGCCA
GATGTGTCTATCAGAGGTTCCAGGGAGGGTGGGGTGGGGTCAGGGCTGGCCACCAGCTATCAGGGCCCAG
ATGGGTTATAGGCTGGCAGGCTCAGATAGGTGGTTAGGTCAGGTTGGTGGTGCTGGGTGGAGTCCATGAC
TCCCAGGAGCCAGGAGAGATAGACCATGAGTAGAGGGCAGACATGGGAAAGGTGGGGGAGGCACAGCATA
GCAGCATTTTTCATTCTACTACTACATGGGACTGCTCCCCTATACCCCCAGCTAGGGGCAAGTGCCTTGA
CTCCTATGTTTTCAGGATCATCATCTATAAAGTAAGAGTAATAATTGTGTCTATCTCATAGGGTTATTAT
GAGGATCAAAGGAGATGCACACTCTCTGGACCAGTGGCCTAACAGTTCAGGACAGAGCTATGGGCTTCCT
ATGTATGGGTCAGTGGTCTCAATGTAGCAGGCAAGTTCCAGAAGATAGCATCAACCACTGTTAGAGATAT
ACTGCCAGTCTCAGAGCCTGATGTTAATTTAGCAATGGGCTGGGACCCTCCTCCAGTAGAACCTTCTAAC
CAGCTGCTGCAGTCAAAGTCGAATGCAGCTGGTTAGACTTTTTTTAATGAAAGCTTGCATGCAGCACTTT
GGGAGGCTGAGGTGGGTGGACTGCTTGGAGCTCAGGAGTTCAAGACCATCTTGGACAACATGGTGATACC
CTGCCTCTACAAAAAGTACAAAAATTAGCCTGGCATGGTGGTGTGCACCTGTAATCCCAGCTATTAGGGT
GGCTGAGGCAGGAGAATTGCTTGAACCCGGGAGGCGGAGGTTGCAGTGAGCTGAGATCGTGCCACTGCAC
TCCAGCCTGGGGGACAGAGCACATTATAATTAACTGTTATTTTTTACTTGGACTCTTGTGGGGAATAAGA
TACATGTTTTATTCTTATTTATGATTCAAGCACTGAAAATAGTGTTTAGCATCCAGCAGGTGCTTCAAAA
CCATTTGCTGAATGATTACTATACTTTTTACAAGCTCAGCTCCCTCTATCCCTTCCAGCATCCTCATCTC
TGATTAAATAAGCTTCAGTTTTTCCTTAGTTCCTGTTACATTTCTGTGTGTCTCCATTAGTGACCTCCCA
TAGTCCAAGCATGAGCAGTTCTGGCCAGGCCCCTGTCGGGGTCAGTGCCCCACCCCCGCCTTCTGGTTCT
GTGTAACCTTCTAAGCAAACCTTCTGGCTCAAGCACAGCAATGCTGAGTCATGATGAGTCATGCTGAGGC
TTAGGGTGTGTGCCCAGATGTTCTCAGCCTAGAGTGATGACTCCTATCTGGGTCCCCAGCAGGATGCTTA
CAGGGCAGATGGCAAAAAAAAGGAGAAGCTGACCACCTGACTAAAACTCCACCTCAAACGGCATCATAAA
GAAAATGGATGCCTGAGACAGAATGTGACATATTCTAGAATATATTATTTCCTGAATATATATATATATA
TACACATATACCATATGAAACACCTCTAGGCTATAAGGCAACAGAGCTCCTTTTTTTTTTTTCTGTGCTT
TCCTGGCTGTCCAAATCTCTAATGATAAGCATACTTCTATTCAATGAGAATATTCTGTAAGATTATAGTT
AAGAATTGTGGGAGCCATTCCGTCTCTTATAGTTAAATTTGAGCTTCTTTTATGATCACTGTTTTTTTAA
TATGCTTTAAGTTCTGGGGTACATGTGCCATGGTGGTTTGCTGCACCCATCAACCCGTCATCTACATTAG
GTATTTCTCCTAATGCTATCCTTCCCCTAGCCCCCCACCCCCAACAGGCCCCAGTGTGTGATGTTCCCCT
CCCTGTGTCCATGGATCACTGGTTTTTTTTTGTTTTTTTTTTTTTTTTAAAGTCTCAGTTAAATTTTTGG
AATGTAATTTATTTTCCTGGTATCCTAAGGACTTGCAAGTTATCTGGTCACTTTAGCCCTCACGTTTTGA
TGATAATCACATATTTGTAAACACAACACACACACACACACACACACACATATATATATATATAAAACAT
ATATATACATAAACACACATAACATATTTATCGGGCATTTCTGAGCAACTAATCATGCAGGACTCTCAAA
CACTAACCTATAGCCTTTTCTATGTATCTACTTGTGTAGAAACCAAGCGTGGGGACTGAGAAGGCAATAG
CAGGAGCATTCTGACTCTCACTGCCTTTAGCTAGGCCCCTCCCTCATCACAGCTCAGCATAGTCCTGAGC
TCTTATCTATATCCACACACAGTTTCTGACGCTGCCCAGCTATCACCATCCCAAGTCTAAAGAAAAAAAT
AATGGGTTTGCCCATCTCTGTTGATTAGAAAACAAAACAAAATAAAATAAGCCCCTAAGCTCCCAGAAAA
CATGACTAAACCAGCAAGAAGAAGAAAATACAATAGGTATATGAGGAGACTGGTGACACTAAGTGTCTGA
ATGAGGCTTGAGTACAGAAAAGAGGCTCTAGCAGCATAGTGGTTTAGAGGAGATGTTTCTTTCCTTCACA
GATGCCTTAGCCTCAATAAGCTTGCGGTTGTGGAAGTTTACTTGTTTATCACCGGTGACGTCCATGAGCA
AATTAAGAAAAACAACAACAAATGAATGCATATATATGTATATGTATGTGTGTATATATACACATATATA
TATATATTTTTTTTCTTTTCTTACCAGAAGGTTTTAATCCAAATAAGGAGAAGATATGCTTAGAACTGAG
GTAGAGTTTTCATCCATTCTGTCCTGTAAGTATTTTGCATATTCTGGAGACGCAGGAAGAGATCCATCTA
CATATCCCAAAGCTGAATTATGGTAGACAAAACTCTTCCACTTTTAGTGCATCAATTTCTTATTTGTGTA
ATAAGAAAATTGGGAAAACGATCTTCAATATGCTTACCAAGCTGTGATTCCAAATATTACGTAAATACAC
TTGCAAAGGAGGATGTTTTTAGTAGCAATTTGTACTGATGGTATGGGGCCAAGAGATATATCTTAGAGGG
AGGGCTGAGGGTTTGAAGTCCAACTCCTAAGCCAGTGCCAGAAGAGCCAAGGACAGGTACGGCTGTCATC
ACTTAGACCTCACCCTGTGGAGCCACACCCTAGGGTTGGCCAATCTACTCCCAGGAGCAGGGAGGGCAGG
AGCCAGGGCTGGGCATAAAAGTCAGGGCAGAGCCATCTATTGCTTACATTTGCTTCTGACACAACTGTGT
TCACTAGCAACCTCAAACAGACACCATGGGTCATTTCACAGAGGAGGACAAGGCTACTATCACAAGCCTG
TGGGGCAAGGTGAATGTGGAAGATGCTGGAGGAGAAACCCTGGGAAGGTAGGCTCTGGTGACCAGGACAA
GGGAGGGAAGGAAGGACCCTGTGCCTGGCAAAAGTCCAGGTCGCTTCTCAGGATTTGTGGCACCTTCTGA
CTGTCAAACTGTTCTTGTCAATCTCACAGGCTCCTGGTTGTCTACCCATGGACCCAGAGGTTCTTTGACA
GCTTTGGCAACCTGTCCTCTGCCTCTGCCATCATGGGCAACCCCAAAGTCAAGGCACATGGCAAGAAGGT
GCTGACTTCCTTGGGAGATGCCATAAAGCACCTGGATGATCTCAAGGGCACCTTTGCCCAGCTGAGTGAA
CTGCACTGTGACAAGCTGCATGTGGATCCTGAGAACTTCAAGGTGAGTCCAGGAGATGTTTCAGCCCTGT
TGCCTTTAGTCTCGAGGCAACTTAGACAACTGAGTATTGATCTGAGCACAGCAGGGTGTGAGCTGTTTGA
AGATACTGGGGTTGGGGGTGAAGAAACTGCAGAGGACTAACTGGGCTGAGACCCAGTGGTAATGTTTTAG
GGCCTAAGGAGCGCCTCTAAAAATCTAGATGGACAATTTTGACTTTGAGAAAAGAGAGGTGGAAATGAGG
AAAATGACTTTTATTAGATTCCAGTAGAAAGAACTTTCATCTTTCCCTCATTTTTGTTCGTTTTAAAACA
TCTATCTGGAGGCAGGACAAGTATGGTCGTTAAAAAGATGCAGGCAGAAGGCATATATTGGCTCAGTCAA
AGTGGGGAACTTTGGTGGCCAAACATACATTGCTAAGGCTATTCCTATATCAGCTGGACACATATAAAAT
GCTGCTAATGCTTCATTACAAACTTATATCCTTTAATTCCAGATGGGGGCAAAGTATGTCCAGGGGTGAG
GAACAATTGAAACATTTGGGCTGGAGTAGATTTTGAAAGTCAGCTCTGTGTGTGTGTGTGTGTGCGCGCG
CGCGTGTGTGTGTGTGTGTGTCAACGTGTGTTTCTTTTAACGTCTTCAGCCTACAACATACAGGGTTCAT
GGTGGCAAGAAGATAGCAAGATTTAAATTATGGCCAGTGACTAGTGCTTGAAGGGGAACAACTACCTGCA
TTTAATGGGAAGGCAAAATCTCAGGCTTTGAGGGAAGTTAACATAGGCTTGATTCTGGGTAGAAGCTGGG
TGTGTAGTTATCTGGAGGCCAGGCTGGAGCTCTCAGCTCACTATGGGTTCATCTTTATTGTCTCCTTTCA
TCTCAACAGCTCCTGGGAAATGTGCTGGTGACCGTTTTGGCAATCCATTTCGGCAAAGAATTCACCCCTG
AGGTGCAGGCTTCCTGGCAGAAGATGGTGACTGCAGTGGCCAGTGCCCTGTCCTCCAGATACCACTGAGC
CTCTTGCCCATGATTCAGAGCTTTCAAGGATAGGCTTTATTCTGCAAGCAATTCAAATAATAAATCTATT
CTGCTGAGAGATCACACATGATTTTCTTCAGCTCTTTTTTTTACATCTTTTTAAATATATGAGCCACAAA
GGGTTTATATTGAGGGAAGTGTGTATGTGTATTTCTGCATGCCTGTTTGTGTTTGTGGTGTGTGCATGCT
CCTCATTTATTTTTATATGAGATGTGCATTTTGTTGAGCAAATAAAAGCAGTAAAGACACTTGTACACGG
GAGTTCTGCAAGTGGGAGTAAATGGTGTAGGAGAAATCCGGTGGGAAGAAAGACCTCTATAGGACAGGAC
TTCTCAGAAACAGATGTTTTGGAAGAGATGGGAAAAGGTTCAGTGAAGACCTGGGGGCTGGATTGATTGC
AGCTGAGTAGCAAGGATGGTTCTTAATGAAGGGAAAGTGTTCCAAGCTTTAGGAATTCAAGGTTTAGTCA
GGTGTAGCAATTCTATTTTATTAGGAGGAATACTATTTCTAATGGCACTTAGCTTTTCACAGCCCTTGTG
GATGCCTAAGAAAGTGAAATTAATCCCATGCCCTCAAGTGTGCAGATTGGTCACAGCATTTCAAGGGAGA
GACCTCATTGTAAGACTCTGGGGGAGGTGGGGACTTAGGTGTAAGAAATGAATCAGCAGAGGCTCACAAG
TCAGCATGAGCATGTTATGTCTGAGAAACAGACCAGCACTGTGAGATCAAAATGTAGTGGGAAGAATTTG
TACAACATTAATTGGAAGGCTTACTTAATGGAATTTTTGTATAGTTGGATGTTAGTGCATCTCTATAAGT
AAGAGTTTAATATGATGGTGTTACGGACCTAATGTTTGTGTCTCCTCAAAATTCACATGCTGAATCCCCA
ACTCCCAACTGACCTTATCTGTGGGGGAGGCTTTTGAAAAGTAATTAGGTTTAGATGAGCTCATAAGAGC
AGATCCCCATCATAAAATTATTTTCCTTATCAGAAGCAGAGAGACAAGCCATTTCTCTTTCCTCCCGGTG
AGGACACAGTGAGAAGTCCGCCATCTGCAATCCAGGAAGAGAACCCTGACCACGAGTCAGCCTTCAGAAA
TGTGAGAAAAAACTCTGTTGTTGAAGCCACCCAGTCTTTTGTATTTTGTTATAGCACCTTGCACTGAGTA
AGGCAGATGAAGAAGGAGAAAAAAATAAGCTTATCGAAACGCGTCCCCATCCTCACTGACTCCGTCCTGG
AGTTGGATGAGAGATAATGGCCTTACGTTGTGCCAGGGGAGGGTCGGGCTGGATTTAGCAAGATTTACCT
TCTCCAAAGAGCGGTGCTGCAGTGGCACAGCTGCCCACGGAGGTGGGGGGGTCACCGTCCCTGGAGGTGA
TGAAGAACTGTGGGGATGTGGCACTGAGGGACATGGCCAGTGGGCACGGTGGGTGGGTTGGGGTTGGTCT
TGGGGATCTTGGAGGGCTTTTCCAGCCTTCATGATTTGACGATTGTATGAACATCTACATGGCAATTCTC
CAGCTGCCTGTCCCAGTCCTACTGACCCAGCTGTATCTCTCCAGGCAAGCTCTTCCACCCCTTCTGCTTG
CATCCAGACACCATCAAACATGCAGGCTCAGACACAGGGACCAGCAGTGTCTGTGGCCTTTTTGTGCTCC
TCTCCATGCTGGGTTTTAACTTGCTCTTTGTCCTTCTATCCTATCTTCTTATCCTTAAGGCTGTTCTGAA
CGCTGTGACTTGGAGAGTGTCCCAGAGCCCTCAACACCTGCATGTCCCACGTCCATGCTGTCCTGCACTT
CCTTATCCCCAAGATCTGCCTCTCCGTGATGCACTGAATTGGCAAACATGTGTCACCCCAGACCAACAAT
GTCACAGCAAACTCCCCCTTGATAGGACAAGGGGGAATGGCTTTACACTGAGACAGGGGAGGTTTGGGTT
GGATATGAGGAGGCAGTTTTTCCCCCAGAGGGTGGTGACGCACTGAACAGGTTGCCCAAGGAGGCTGTGG
ATGCCCCATCCCTGCAGGCATTCAAGGCCAGGCTGGATGTGGCTCTGGGCAGCCTGGGCTGCTGGTTGAT
GACCCTGCACATAGCAGGGGGTTGGATCTGGATGAGCACTGTGCTCCTTTGCAACCCAGGCCGTTCTATG
ATTCTGTCATTCTAAATCTCTCTTTCAGCCTAAAGCTTTTTCCCCGTATCCCCCCAGGTGTCTGCAGGCT
CAAAGAGCAGCGAGAAGCGTTCAGAGGAAAGCGATCCCGTGCCACCTTCCCCGTGCCCGGGCTGTCCCCG
CACGCTGCCGGCTCGGGGATGCGGGGGGAGCGCCGGACCGGAGCGGAGCCCCGGGCGGCTCGCTGCTGCC
CCCTAGCGGGGGAGGGACGTAATTACATCCCTGGGGGCTTTGGGGGGGGGCTGTCCCTATCGATTACTAG
TTTAGCCATAGAGCCCACCGCATCCCCAGCATGCCTGCTATTGTCTTCCCAATCCTCCCCCTTGCTGTCC
TGCCCCACCCCACCCCCCAGAATAGAATGACACCTACTCAGACAATGCGATGCAATTTCCTCATTTTATT
AGGAAAGGACAGTGGGAGTGGCACCTTCCAGGGTCAAGGAAGGCACGGGGGAGGGGCAAACAACAGATGG
CTGGCAACTAGAAGGCACAGTCGCTCGAAGAGCGGCCGCTCGCTTTACTTGTACAGCTCGTCCATGCCGA
GAGTGATCCCGGCGGCGGTCACGAACTCCAGCAGGACCATGTGATCGCGCTTCTCGTTGGGGTCTTTGCT
CAGGGCGGACTGGGTGCTCAGGTAGTGGTTGTCGGGCAGCAGCACGGGGCCGTCGCCGATGGGGGTGTTC
TGCTGGTAGTGGTCGGCGAGCTGCACGCTGCCGTCCTCGATGTTGTGGCGGATCTTGAAGTTCACCTTGA
TGCCGTTCTTCTGCTTGTCGGCCATGATATAGACGTTGTGGCTGTTGTAGTTGTACTCCAGCTTGTGCCC
CAGGATGTTGCCGTCCTCCTTGAAGTCGATGCCCTTCAGCTCGATGCGGTTCACCAGGGTGTCGCCCTCG
AACTTCACCTCGGCGCGGGTCTTGTAGTTGCCGTCGTCCTTGAAGAAGATGGTGCGCTCCTGGACGTAGC
CTTCGGGCATGGCGGACTTGAAGAAGTCGTGCTGCTTCATGTGGTCGGGGTAGCGGCTGAAGCACTGCAC
GCCGTAGGTCAGGGTGGTCACGAGGGTGGGCCAGGGCACGGGCAGCTTGCCGGTGGTGCAGATGAACTTC
AGGGTCAGCTTGCCGTAGGTGGCATCGCCCTCGCCCTCGCCGGACACGCTGAACTTGTGGCCGTTTACGT
CGCCGTCCAGCTCGACCAGGATGGGCACCACCCCGGTGAACAGCTCCTCGCCCTTGCTCACCATGGGCCC
TGGGTTGGACTCCACGTCTCCCGCCAACTTGAGAAGGTCAAAATTCAAAGTCTGTTTCACCTCGAGGTTT
CGGCCAGCAGGCGGGGAGCCCGAGGTAGCTCCCGCTCCCTTGAGCCAGGCCCCTGCCAGACCTGAGCTCC
CTCCCAAGCCTGGCTTCCCCAACCGGTGGCCTTCATGGGCCAGAAGCCATTCCTTCACGGCTAGCCCTCC
GGAGTAGTTGCCCACGGCTCCGCTGCTGCAGACCACTCTGTGGCACGGGATGAGGATCTTGACAGGATTG
CCTCTCATGGCGCCTCCCACTGCTCGCGCGGCTTTGGGGTTGCCGGCCAGGGCGGCCAATTGCTGGTAAG
AAATCACTTCTCCGAATTTCACAACCTTAAGCAGCTTCCATAACACCTGACGCGTGAACGACTCTTGCTG
GAAAACGGGATGGTGAAGCGCTGGCACGGGGAACTCTTCGATAGCCTCGGGCTGGTGGAAATAGGCATTC
AGCCAGGCTGTGCACTGCATCAGGGGCTCCGGACCTCCGAGAACCGCAGCGGGGGCTGGGACCTCCACGG
CATCAGCTGCAGACGTCCCCTTGCCCAGGAGCTTTATTTCGTGCAGACCCTGCTCACAACCAGACAGCTC
CAGCTTCCCCAAAGGGCTGTCCAGTGTGGTGCGTTTCATTTCACAATCCTTGTCCATGGTGGCCCTAGGC
CCTGGGGAGAGAGGTCGGTGATTCGGTCAACGAGGGAGCCGACTGCCGACGTGCGCTCCGGAGGCTTGCA
GAATGCGGAACACCGCGCGGGCAGGAACAGGGCCCACACTACCGCCCCACACCCCGCCTCCCGCACCGCC
CCTTCCCGGCCGCTGCTCTCGGCGCGCCCCGCTGAGCAGCCGCTATTGGCCACAGCCCATCGCGGTCGGC
GCGCTGCCATTGCTCCCTGGCGCTGTCCGTCTGCGAGGGTACTAGTGAGACGTGCGGCTTCCGTTTGTCA
CGTCCGGCACGCCGCGAACCGCAAGGAACCTTCCCGACTTAGGGGCGGAGCAGGAAGCGTCGCCGGGGGG
CCCACAAGGGTAGCGGCGAAGATCCGGGTGACGCTGCGAACGGACGTGAAGAATGTGCGAGACCCAGGGT
CGGCGCCGCTGCGTTTCCCGGAACCACGCCCAGAGCAGCCGCGTCCCTGCGCAAACCCAGGGCTGCCTTG
GAAAAGGCGCAACCCCAACCCCGTGGAAATAAATCGATAACTAGTGATATCATCATGTCTGGATCCCATC
ACAAAGCTCTGACCTCAATCCTATAGAAAGGAGGAATGAGCCAAAATTCACCCAACTTATTGTGGGAAGC
TTGTGGAAGGCTACTCGAAATGTTTGACCCAAGTTAAACAATTTAAAGGCAATGCTACCAAATACTAATT
GAGTGTATGTTAACTTCTGACCCACTGGGAATGTGATGAAAGAAATAAAAGCTGAAATGAATCATTCTCT
CTACTATTATTCTGATATTTCACATTCTTAAAATAAAGTGGTGATCCTAACTGACCTTAAGACAGGGAAT
CTTTACTCGGATTAAATGTCAGGAATTGTGAAAAAAGTGAGTTTAAATGTATTTGGCTAAGGTGTATGTA
AACTTCCGACTTCAACTGTAGGGGATCCTCTAGGGCCGCCAGTGTGATGGATATCTGCAGAATTCGGCTT
CAGGTACCGTCGACGATGTAGGTCACGGTCTCGAAGCCGCGGTGCGGGTGCCAGGGCGTGCCCTTGGGCT
CCCCGGGCGCGTACTCCACCTCACCCATCTGGTCCATCATGATGAACGGGTCGAGGTGGCGGTAGTTGAT
CCCGGCGAACGCGCGGCGCACCGGGAAGCCCTCGCCCTCGAAACCGCTGGGCGCGGTGGTCACGGTGAGC
ACGGGACGTGCGACGGCGTCGGCGGGTGCGGATACGCGGGGCAGCGTCAGCGGGTTCTCGACGGTCACGG
CGGGCATGTCGACAAGCCGAATTCCAGCACACTGGCGGCCGTTACTAGGTAGCTAGCTCGAGCCTTCGAA
GATCTCCTAGGGAAGTTCCTATACTTTCTAGAGAATAGGAACTTCGGAATAGGAACTTCACCGGTGGGTG
AAAAGCCGAATTCTGCAGATATCAAGCTTATCGATACCGTCGACCTCGAGGGGGGGCCCGGTTAGATCCC
CGGGTACCGAGCTCGAATATCTATGTCGGGTGCGGAGAAAGAGGTAATGAAATGGATTAAGTGGCAGGAT
TAATTAAGTGGCAGGATTAATCTTCGAACGAAGGAGCCATCCAACTAACCGTCATGTTCGGGCAACCGAA
GAAGGGAGTGGCAGGATTTCCTTTGGAGACTTCTGGAATTAGACAGCAGTTTAATGCAAGCATCTAAATT
CTCTTCCTCCCAGAGTCTCATTAAAACTACAGTAAGAGTTTGTGTTTTGTTTTGTTTTTAAAGACAAAAT
CCCACCAGGATAGAGAGAATAGGAGAGGAGATAACAGCATCATAATTTATGAAACTAAAATGCAGATAGA
CCAGGATTAACTGACTACACAGCACCAAGGAAGCTGAATCACAAGACAGCAGAGGAGAAAACTGGAAAGG
ATCGTGGTCTATACGGCAGAATCTTCCCAAGCCTCAGGAGGAGGAGCTCTAGATGCTTATGATGGCAACT
AAAGCCTAAAAGCTAATTCATTTTAAAGTTCTTCCAAATGCATAGGGTTTTATTTTTCCAGACCTGGGTT
CAGATGGGGAATTTGACAAACAATGGAAAGGGGGAAAAACAACAATCTAAACACTGAGTGACAAAGTAAC
AAAGAAATAGTCTAGCTATCAGCCAGTCAAGCCAGCCTTGGCTTTGCTATCCAAAGTAGTCAGTCTAATT
CTACCACCAGTTTCTGTTCCTGTAGCTGTCTACTGCCTGCCAGGGACTCTGCCTTCCCACCCACAACTAC
CAATGGAAGGATGTGGTGACCATACCAGTGGCTGCTGACATCTCCTGCCATGGGAAGCATAATTGCCTCC
AGCAGCCTCCCCCTTAGATCCATCATTTTTGTTGCACTTGGCCTGGGCTGTACTCCCGGCCAATGACTGA
ACATGGTGAGCATAGTAATGCAGGCCCATTTCTGTGAGGAGCAGGACTCCTCCAGTAGGTGACTTTGGCT
CAAGGACTCTCTATTGGCCTGGTTGAACTTTTCCTGAACTGTGCTACTGTCTGAGACTCTTCTTACCCAA
TCCTCTTTCTCGCCCCAATTGTCACAGACCACCTGCATTGTGGTCTGAGTCTCTCCCCACCTTCTCTTGC
TCTTCCCTGTTTATCTTTCACAGGCATTTCCCCCAGTACATTCCTTGAATGTCTAACCCGATACGGGTGC
CTGACTTTTGGCAGACCTAAGCAGACAAAAAGGAGTACTTGGTTACCTAGCTCTTCTTTCTACCACAAAC
ATCGAGGGAACCCTTTTTCCCTCACCCCTCTGCCACACCCCCACTGCCCCAGTGAACAACCACAGAGAGA
GCTGTGGTATAATATTAGGCTGGTGCAAAAGTAATTGCGGTTTTTGCCATTACTTTTAATGGTAAAAACC
GCAATTACTTTTGCACCTACCTAGTATTTGTGTCCCCCCAAATTCATATGTTGAAACCTAACCCACAATA
TGATGTCATTAGGAGGCAAGACCTTGAGGAGGTGATTAGATGATGGGGTGGAGCTCTCCTGAATGAGATT
AGTGCCCTTATAAGAAGAAGCCCAAGGAAGCTACCTTGACTCTTCCATCACATGAGAATGCAGCAAGAAG
GCACCATCTACTAATCAGGAAGAGAGCTCTCACCAGACACTGAATCTGCCAGTGTCTTGATCTTGAAGTT
CCCAGCCTCCAGAACTATGCATAATGCATTTCCATTGTCTCTAAGCCACCCAGCCTATGGTATTTTGTCA
TAGCAGCCTGAACTGACTAAGACAGTGAGCCACATGAGAAGTGCCCCAACCCCTCCCTTAAGCACTTGGC
TCACAGATCAGTGGGTTCATTTCTGCCTGAGTTTTATTGTTATTCTGTAGATTTCTTGGGCTAGATATAT
TTTTCTGTTATTTTCCTTCTTCACCTCAGTCATGAATTGGTTGTTTTAAAAAAGACAATGTAAGTCATGG
GGAAACTCCTGACAACTCTACTCTCCTAGGGTTCCTGATAAAAGGGGATTCAGTTGAGTCCTCTGATGGT
CTCTACCTGCCAAAGTCCAGCAGCCCTTAGCAAACATGCTGCTCGTTTCTGTAGAGAAGGTGCTGGTGTC
CCACCATACTTCTCTCTCCCTCATGAAGGGCTTGCGACCCAGCAAATGGGTGGCTTATATGGGTCTGTTT
CAAAGGAAGAGCCAGCTCTGGGAAGAAAAACGATGAGCATAAGCATAACCTACCACTGTGCCTGGGAAAG
CAGACAACTTTTTTGATGTGTGAATATCTAATGAGAATGGAATCCATCAATTACCTTAAACTTAGGCACA
GTCTTCAAATTCAATATATGTGGGATATACTTTTAGTCAGTTTGTAGACGTTATTTGTAATAAATAATCT
GGCTTCTCTAAAGAAATTATTTTAAGTGTTTGGTTTGGTTTGATTTAATGGTAAAATTATATTTAGTGGC
AGAGAATTATAGCAATGGTGATAAACTATAGAGTGTCATAAGTTCATATCTTATTCTCACATTTGAAGCT
GCCTGCAGATGCATTCAAGATGCAGCCAGAAGTCAGGAGACTCAGGCTGTTATTTGGAGCTCATCATTTT
ACAGCCTTGCTGGACTCCCACTTTCTCAGGGGAAAAATGTGGTGTTGACCCAGATTAGCTCTCCAGGCCC
TGCTGAGTTGGGCACTCTGTAAGCTGGAGGGTCTTCTATTGTCTTCACCTAAGTGTCAATCAACAACCCA
AATGGGCATGGGGGAAGAGGGAGCTGGGCCAATGCCCAGGGTGCCTGGTAGAGAGATACCTTGGGCACTG
GAAGGCACCAGCTTCCCAGAGAGAAGGGGGAGGGCCATGAAAAAGTTGGCTGTAGATGCCAGGGACACTG
GGACTCTCCAGCTGTGTGTTTGTGTCTTCTGAAGACTTATGTTTCATTCCTTTGGAGCATGCATAATCAT
ACACTGTGGGATGTGTTATATAGATTGCTTGATAGTTCACCACTGTAATAAAATACTGTGACTGGAATCT
GCTCCCAGTCTGCCTTTGATAGCACTTGTGCAACACACATTTACTGAGCATTTACAGTGATCCAGGACCT
GTGTTGTGAAAACATTGATGGACAAGGCAGATGGTGGAGCACGTCAGTGAGGATTTTTAACAAAGGCTGG
TAAGTGCTATAAAGGAACATTGTAGGACACTAGAGAACAAAGAACAGGAGAACCTGACTTAGGCTGGGGT
GGGGCGTTGGTTAGAGGAGGCTCCTTGGAGGACATGAGGTTTAAGCTGTGACCTGAGGATGAATAGATGT
TGGCCAGGTGAGGTTAATCTGGGGCTCAAGATCGAGCATTAAGCTTGTCAGCCTTACCAGTAAAAAAGAA
AACCTATTAAAAAAACACCACTCGACACGGCACCAGCTCAATCAGTCACAGTGTAAAAAAGGGCCAAGTG
CAGAGCGAGTATATATAGGACTAAAAAATGACGTAACGGTTAAAGTCCACAAAAAACACCCAGAAAACCG
CACGCGAACCTACGCCCAGAAACGAAAGCCAAAAAACCCACAACTTCCTCAAATCGTCACTTCCGTTTTC
CCACGTTACGTAACTTCCCATTTTAAGAAAACTACAATTCCCAACACATACAAGTTACTCCGCCCTAAAA
CCTACGTCACCCGCCCCGTTCCCACGCCCCGCGCCACGTCACAAACTCCACCCCCTCATTATCATATTGG
CTTCAATCCAAAATAAGGTATATTATTGATGATGTTTAAACTACGGCCCGGTACCCAGCTTTTGTTCCCT
TTAGTGAGGGTTAATTGCGCGCTTGGCGTAATCATGGTCATAGCTGTTTCCTGTGTGAAATTGTTATCCG
CTCACAATTCCACACAACATACGAGCCGGAAGCATAAAGTGTAAAGCCTGGGGTGCCTAATGAGTGAGCT
AACTCACATTAATTGCGTTGCGCTCACTGCCCGCTTTCCAGTCGGGAAACCTGTCGTGCCAGCTGCATTA
ATGAATCGGCCAACGCGCGGGGAGAGGCGGTTTGCGTATTGGGCGCTCTTCCGCTTCCTCGCTCACTGAC
TCGCTGCGCTCGGTCGTTCGGCTGCGGCGAGCGGTATCAGCTCACTCAAAGGCGGTAATACGGTTATCCA
CAGAATCAGGGGATAACGCAGGAAAGAACATGTGAGCAAAAGGCCAGCAAAAGGCCAGGAACCGTAAAAA
GGCCGCGTTGCTGGCGTTTTTCCATAGGCTCCGCCCCCCTGACGAGCATCACAAAAATCGACGCTCAAGT
CAGAGGTGGCGAAACCCGACAGGACTATAAAGATACCAGGCGTTTCCCCCTGGAAGCTCCCTCGTGCGCT
CTCCTGTTCCGACCCTGCCGCTTACCGGATACCTGTCCGCCTTTCTCCCTTCGGGAAGCGTGGCGCTTTC
TCATAGCTCACGCTGTAGGTATCTCAGTTCGGTGTAGGTCGTTCGCTCCAAGCTGGGCTGTGTGCACGAA
CCCCCCGTTCAGCCCGACCGCTGCGCCTTATCCGGTAACTATCGTCTTGAGTCCAACCCGGTAAGACACG
ACTTATCGCCACTGGCAGCAGCCACTGGTAACAGGATTAGCAGAGCGAGGTATGTAGGCGGTGCTACAGA
GTTCTTGAAGTGGTGGCCTAACTACGGCTACACTAGAAGGACAGTATTTGGTATCTGCGCTCTGCTGAAG
CCAGTTACCTTCGGAAAAAGAGTTGGTAGCTCTTGATCCGGCAAACAAACCACCGCTGGTAGCGGTGGTT
TTTTTGTTTGCAAGCAGCAGATTACGCGCAGAAAAAAAGGATCTCAAGAAGATCCTTTGATCTTTTCTAC
GGGGTCTGACGCTCAGTGGAACGAAAACTCACGTTAAGGGATTTTGGTCATGAGATTATCAAAAAGGATC
TTCACCTAGATCCTTTTAAATTAAAAATGAAGTTTTAAATCAATCTAAAGTATATATGAGTAAACTTGGT
CTGACAGTTACCAATGCTTAATCAGTGAGGCACCTATCTCAGCGATCTGTCTATTTCGTTCATCCATAGT
TGCCTGACTCCCCGTCGTGTAGATAACTACGATACGGGAGGGCTTACCATCTGGCCCCAGTGCTGCAATG
ATACCGCGAGACCCACGCTCACCGGCTCCAGATTTATCAGCAATAAACCAGCCAGCCGGAAGGGCCGAGC
GCAGAAGTGGTCCTGCAACTTTATCCGCCTCCATCCAGTCTATTAATTGTTGCCGGGAAGCTAGAGTAAG
TAGTTCGCCAGTTAATAGTTTGCGCAACGTTGTTGCCATTGCTACAGGCATCGTGGTGTCACGCTCGTCG
TTTGGTATGGCTTCATTCAGCTCCGGTTCCCAACGATCAAGGCGAGTTACATGATCCCCCATGTTGTGCA
AAAAAGCGGTTAGCTCCTTCGGTCCTCCGATCGTTGTCAGAAGTAAGTTGGCCGCAGTGTTATCACTCAT
GGTTATGGCAGCACTGCATAATTCTCTTACTGTCATGCCATCCGTAAGATGCTTTTCTGTGACTGGTGAG
TACTCAACCAAGTCATTCTGAGAATAGTGTATGCGGCGACCGAGTTGCTCTTGCCCGGCGTCAATACGGG
ATAATACCGCGCCACATAGCAGAACTTTAAAAGTGCTCATCATTGGAAAACGTTCTTCGGGGCGAAAACT
CTCAAGGATCTTACCGCTGTTGAGATCCAGTTCGATGTAACCCACTCGTGCACCCAACTGATCTTCAGCA
TCTTTTACTTTCACCAGCGTTTCTGGGTGAGCAAAAACAGGAAGGCAAAATGCCGCAAAAAAGGGAATAA
GGGCGACACGGAAATGTTGAATACTCATACTCTTCCTTTTTCAATATTATTGAAGCATTTATCAGGGTTA
TTGTCTCATGAGCGGATACATATTTGAATGTATTTAGAAAAATAAACAAATAGGGGTTCCGCGCACATTT
CCCCGAAAAGTGCCACCTGACGCGCCCTGTAGCGGCGCATTAAGCGCGGCGGGTGTGGTGGTTACGCGCA
GCGTGACCGCTACACTTGCCAGCGCCCTAGCGCCCGCTCCTTTCGCTTTCTTCCCTTCCTTTCTCGCCAC
GTTCGCCGGCTTTCCCCGTCAAGCTCTAAATCGGGGGCTCCCTTTAGGGTTCCGATTTAGTGCTTTACGG
CACCTCGACCCCAAAAAACTTGATTAGGGTGATGGTTCACGTAGTGGGCCATCGCCCTGATAGACGGTTT
TTCGCCCTTTGACGTTGGAGTCCACGTTCTTTAATAGTGGACTCTTGTTCCAAACTGGAACAACACTCAA
CCCTATCTCGGTCTATTCTTTTGATTTATAAGGGATTTTGCCGATTTCGGCCTATTGGTTAAAAAATGAG
CTGATTTAACAAAAATTTAACGCGAATTTTAACAAAATATTAACGCTTACAATTTCCATTCGCCATTCAG
GCTGCGCAACTGTTGGGAAGGGCGATCGGTGCGGGCCTCTTCGCTATTACGCCAGCTGGCGAAAGGGGGA
TGTGCTGCAAGGCGATTAAGTTGGGTAACGCCAGGGTTTTCCCAGTCACGACGTTGTAAAACGACGGCCA
GTGAGCGCGCGTAATACGACTCACTATAGGGCGAATTGGAGCTCCACTACGTAGTTTAAACATCATCAAT
AATATACCTTATTTTGGATTGAAGCCAATATGATAATGAGGGGGTGGAGTTTGTGACGTGGCGCGGGGCG
TGGGAACGGGGCGGGTGACGTAGTAGTGTGGCGGAAGTGTGATGTTGCAAGTGTGGCGGAACACATGTAA
GCGACGGATGTGGCAAAAGTGACGTTTTTGGTGTGCGCCGGTGTACACAGGAAGTGACAATTTTCGCGCG
GTTTTAGGCGGATGTTGTAGTAAATTTGGGCGTAACCGAGTAAGATTTGGCCATTTTCGCGGGAAAACTG
AATAAGAGGAAGTGAAATCTGAATAATTTTGTGTTACTCATAGCGCGTAATATTTGTCTAGGGCCGCGGG
GACTTTGACCGTTTACGTGGAGACTCGCCCAGGTGTTTTTCTCAGGTGTTTTCCGCGTTCCGGGTCAAAG
TTGGCGTTTTGATTC (SEQ ID NO: 178)
The nucleotide sequence of LCR-F8
(Ad5 5′end: 1→440; Sleeping beauty IR:6169→6395, 20868→21095;
HS4-HS1: 6661→10971; Beta promoter: 10991→11653; ET3: 11690→16093;
Mgmt: 18661→19284 (reverse); Ef1a promoter: 19302→20636 (reverse); and
Ad5 3′end: 33317→33514):
CATCATCAATAATATACCTTATTTTGGATTGAAGCCAATATGATAATGAGGGGGTGGAGTTTGTGACGTG
GCGCGGGGCGTGGGAACGGGGCGGGTGACGTAGTAGTGTGGCGGAAGTGTGATGTTGCAAGTGTGGCGGA
ACACATGTAAGCGACGGATGTGGCAAAAGTGACGTTTTTGGTGTGCGCCGGTGTACACAGGAAGTGACAA
TTTTCGCGCGGTTTTAGGCGGATGTTGTAGTAAATTTGGGCGTAACCGAGTAAGATTTGGCCATTTTCGC
GGGAAAACTGAATAAGAGGAAGTGAAATCTGAATAATTTTGTGTTACTCATAGCGCGTAATATTTGTCTA
GGGCCGCGGGGACTTTGACCGTTTACGTGGAGACTCGCCCAGGTGTTTTTCTCAGGTGTTTTCCGCGTTC
CGGGTCAAAGTTGGCGTTTTGATTCGGCCGAAGGATTACATGAGCTTAGAAATGTAATTAGCATAGTGTG
TGGCATAGTGTAGATACCAAATAAATATGATCTCTCCTTCTACTCTTGAAAATGCAAACACATTCTTGGT
GGTCCTAAAATAGCCTGTAACATGGTTTACTCAGCAGCATTTGCTATTCAAGGCAGATCTGCCTTTAGTC
ATTGGCTGCGCTCCTGAACAGCTGTGTGAAAGGCTAACTTTTGTAAACCAAATCAAAATAAAATGCAGCA
AAAATTTGTCACTGAAAGGAAATCCTCAGTATATCCTTTTATGAAATGAAAGATCCCTCATCCAAACTTA
ACTTTTTTAAAAGTGCGCATTTGGAGATATAGCCCTTTCTTATGAATCCTAATTCAATTTTGGCCATAAA
CACACGTTGATGTTCCCCACCCCAAAGCACATAGCAACAAGAGTAGGTTCTATATTGAAAATAATGACAA
TTTAAAAACATGTACTTATTTCACTGTATGTGGACAGTGTCTATGATTGCATCATGAAGTGTCATATAAC
CATGTACGTGTACATGAGAGAGAGATAGAGAGAGAAGTGGTAGGGTGGTGGTGGTAGAGGGGATGGCGAT
AGTAATCATGGTAATGGTAGAGGTGATGGAGGTGGTAATGACGGAGGTAAGGGTGGTAGTGATGATGGTG
GTGGTGGTAATGGTGGTGGATGTGGTGGTGGCAATTGGGATGGTGGGATGGTGGTAGCCATGGTGATGGT
GGTAATGGTGTTGATTTAAAGGGTGGTGGTAGTGAAGGTGAGGGTAGTGGTGGTGGAGGTGGTGGTGCTG
GTAGCAATAGTGATGGTGGTGATGGTGTTGATGAGGGTGTTGGGATCAGGGTGAGTTCCCACAGTATATT
TCATTCTTGTTGTACCACTCTGTCAACAGCACCACTGACTGGGACAGAGGAAGAAGGCACACTCTGAATG
TGTTATTAACAGAAACCTCAAAACAGTCTGTCTCCTTGTAGTCATTCAAAATTATCTTTTTCTTACCTGG
AAAACTGAAACTGAATTACCGGGAAAAACACAGGAGATTTTTGTTTGTTAATATGCTGCCAATAAAGTAA
TTTTATGTCAAATTTAACTACAGGAAAGGGCAAGGCATTTTCTAAGTTCCTTAGATGTCATGTGGCTAAA
AAAAACAAAAGGATGGACAGCAGTTAGATACTGTACACTTAGCTGTTTGAAGCCATATATTCAGAAAGCA
GATGTTGGGAGTTGGTGTTTGAGGACTGATTTCCTGGAGGTATTTTATATAGGCCAAGTTCATTGTTCTA
AACTCTAAGGGCTTGACTTGAGGGAGGAAAAGAGGCAAGAACATGTTTAGTTTTGCTGACAGCATCACAT
GGGCAGCCCTAAGGCTAGACAACTTTAGGGCCTGAAGCTTATTCTAGGAAAGAAGCACCTACAGAGTGGC
ACTGGGCTCCCCTCCACTATAGAGATGAAGTCATATGACAGTAAAGGGCAGGCAGGGCTGCCTAGGGGGC
CCATTGAAATTGCGGCCGCAAATAATGGGCCCGGAGCAAGAGAGAGGGAGGCAATGACAGCAGAGACATG
CCTGCGCCTTGGGTTTGAGTGCCCAGTGGTCAAATCCACTTCCCTGTGGCTGATGCTTGCCTTTCTAACT
TTGGAATTTAGGGGTTGGAGATCTGGTGAGAAGGTAGGAGGGAGATGAGGAGGAGAAGGGAAAGGCAGGA
AGGAAGGGGAGGGAAAGGAAAAGCAAAAGGGGAGGAGGAAGGTTTCCAACAAATTATTCTATATCAACTG
CGGAAATCAAAATTTGTTGCCCAAATCTTAGAAGCTCATGTCCCTCCTCCCCAGAAGTCTGGAATGCAGC
ACTCCAGGGGTAGCTTATAACCCAAATATCTATCTGTAAAAAGAGAAACATTGGGCTTTCGAGCTGTGGA
TTCTCAGTAAAAGCAAGAGGCCTCAGCCTACACAGGCCAGCCCAGAGTTTGAGGAACCCCAGGCCCACAC
CCACAGGGCTGGCCCCTGGGTCTGCATACTCCCTAGAAATGTGCACACTTCTGAGCCTCAACTCTGTCCT
GGAGTCTAACAGCATCCCTCTCCTTCCTGGGGCAGTTCCACCTCCAGAAACCTGTTACCTTGGGCCTTAT
GTCAAGGAAACTGTGGGAAAGAGCTAGGCAGGAATGCAGATGAGGCCAGCATGGGCTCCTAAAAGTTTAG
AAATAGGCAGTGTCATGCTCCCAGGTGCCTGCATAAACCAGCTGAAAAATGGAGCTCCCCTCACCAGCAC
TCTCCCTTCAAACAGACTGTGATTTGCAGGTCACTGGTTTACCAAGCCAGGCTACCCAGGCAGGACCCAG
ATGCCAAGCCCAGTGGTGTCCTGCAAGCTGAGCAGTGCTCAGTTCTTGCAAAAAAAGGTCTGTGTGAAGG
CAAGGCCTCTGCCTGGCTTCTCACCCCAGTTGGGTGTCTGGAACAGGAAGGAGCCCTTACTGCAGAAAAA
GGAGGAGGGAGCAAAGGGAGCGAACAGCTGCGTGCTCCATGGGGAGGATCCCCAAAGTAGAAAGGCGCAT
ACACACTGCAGCCCTTGACCCAGAATGCTCACAGCTACATTACAGATTCAGGTCTCCTCAGTGTAGTGGG
GCTGCTGATGAGACTGTGGCATCCTCAGGGGTCAGGACACACATTTTCCATCACTCTTCTGATGGCAAAA
AACCTCTGAGCCAATGCCAACCTCTGATCATTAAAAAAAAGTGCTCACAGCAGTGTGTGGTTTAGGATCA
TGCCCTGTGTGGTTTGGAACACGTGCACAACCACACCTTGTTCATCACCATCCCAGAAACCCTGACGCAG
GCAAAGAGCAGAGTTATTAACCCTACTTTACTGATGTGGATACTGAGGCCCAGAGGCTCATGCAAGTTAT
CAATAAGTGGCAGGGACAGTTGCCTCTAGATTAACTAGCCCCTAGGATCACCTGGGTCTTGGAAGGGGAC
CCATAAACATGAGCTCCCCTCTCTTGGGGCCAGATTTGCACCTGTGCCGCGCCTTCAGCCTGCATGAAGT
AGGGGCTGCTGGCAAAGACTCAAAGCTGTAAATCTGGGTTTTCTCTTGAGGCTTCTAAGGGAGCTGTTTC
GACAACTCACTCTGTTCCCAGCTGGCTGCCCCTGCATAGGGTTTTAAAGCAGCCTAGCTTTCTGCCAGGC
TTGGCAGTGGACAACGCTGGTCAGAACATCCCAGAGAGCTACCAGAATGAAGTAAGTTTGCTTCTACTCT
TTACCTGTTTATGGGCTGTCTCTGCCACTGGAATGAAAGGCACTGAGAACAGTGCCTGGCCTGCAGAAGG
CCCTGGAAATACCTGAGCTCCTAATCTGGGAATAGGAGTAGGAAGAGCTTTGGAGGCAGGGCACCTGAGT
TTGAGATCTACAACTTCCTGCCTGTGTGACATTGGGAAAGTCTCCATCCTTTCTGAGCCTCAGTCTCCAC
CCTGGGGAAGTGGAAATATCAATCTCTGTGACACAGAAGCAAATGAGCGAATGTGCACAAAGTACCTTGC
ACAAGAGAGACGCTCAAACACTTGCCTCCAGGTTTCACCGAGAACTACAGAGTAAGATAGATTTGTTCCC
AGTGGAGGAAGCCTGGGAATAATTTGCCCCTAGACTATGAATTCCTGGGGCTCAAGATCGAGCACAGGGC
CAGGCACACAGAAGGGACCCTGGAAATGTGGCAGGAGGCCAGAGATAGACAGGCCCTTAGAGCTCATACC
CATGCCCTCTGACCTCAAGAAGAAAGAAACCTGCTCAAAATCTCACAAAGAGCTTGTTCCAACCCTGAAT
CGAGTCTGAGGACTCCTTCCTGAGTCCAGCACTTTTTCTGCAAGAAGTATATGCCTCCAAAGCTGATGGG
CGCAAATCTTGAACCCCGTCACATAAACACAAAGGGAGGAGGTGACTAGAGCTCCTCCTACTGGATATGT
CTAAGGTCACCAGTCTAAAGAAAAGGGATGGATAGAATGAGGCCAGTATTTTTGCAGCCATCCAAATGTC
CACATACGCTGTTACACTGAGGGCTCCTCTCTCCCCCGTCTTCAGCCCTACTTGCATTTAGAGGTGAGAA
AGATATGGGCTGAGGGGTTGTTTTTCATCGTATTGTAGATGGAAAGCACACTGCCCTTGGGGCCATCCAA
ATGTGGACCTTGATGTAGCACCCCACCTTCTGGATGGCCATCCTTCTGAAAGTCACTGAATTTCTCAGAC
TTTATTCTCTTTATCCATAAAGAAGGAGAATAATAATAATCCCCCCACCCTGCCCAACCACTGACTGGTT
GGGAAGCTCAGAAGAAATACTGGGCACGGCATCCCATTGTAATCTATAGAGTGAGTCGCTTCTTAATATT
AAATGGCTGAACACAGAAGATGTGCAAAAAGTACTGTGTCCCCTTCCTCCTCCAACTGAACATTTCATGC
CCTTTGCACCCTCATTTTGTCTAGGAGCTGCCTTATGAAGGGAATAGGTACCTGCTCCGAGCTGGAGGAA
TCTTTGCCACTTATGGTGGGGTATGGACTGAGACAGAGATGGCATGTGACATGCGCACTGAGTCTCAACT
CCATGCAGGCTCTGGAGCACTCTCAAATTGGAGTACTAATGCCTTTTAAATTCTCACACTAGCAATCCTT
TGACCTACTGATCTAGGGATCTAGGGAAAGAATCGTGATCTTAACTTCAAAGGGAAGGACAAAATGTTCT
GCCTCCTGTTAAAACTCCATACACTAAGTGCAGAGACTGGATGCCTTATTAACCTTGGGTAGATGCCCAA
ATGTTCAAAAGGTCAAACTCTTCTGTTCCCCAGATCGCCAGAGTCATTAACCAGTCACACTATTAAATGA
ATGAACAGATGCTGAAAAGGTACTTGCATTACTGAGATTTCTTATGGTGATGGCCCCTGCCTGATATGTA
TTCAGCATTTTGTAGTTTTCAATGTGCATTAGAGTATAGTGGTGATGACATTGGCCTCTGAGTTTGCCAC
TTCTTATATCTGTGACTTTGGTCAAATTGCTTAATCTCTCTGAGTCTCGGTTTCCTGGAGATAATAATAG
CTTCTTCTTCCCAGGGTTATCATGAGGATTACAGGAGATAATGCCCCAAAAATGCTTAGTAAAGTGCCTA
GCACCTAGTCAATGCTGAATTAAAGGTGGTTATTCTTACTTTTCGTTCATTTGAACTTTGTTCTCAGGGA
GGGCAAAGGATAGACAAAGCCCCATAGCTAGTGAGGAGTAGCTGCAAGACTAGAACCCAGGTGTTCTGAG
CCCTAGTCTTAGGCCAAGAACAACTGTTACGTGAGATGCACGTTTTCCTTCAAGGGAGCTCACAATTATT
TCCATGTAAATTCAAGGACTGCTAAAAGAGAACTCTCCTCTGGGACTGATAAACATCTAGTCGAGTATCG
ACAAATAGGGGTTCCGCGCACATTTCCCCGAAAAGTGCCACCTGACGTAACTATAACGGTCCTAAGGTAG
CGAAAGCTTGCATGCCTGCAGGTCGACTCTAGAGGATCAAACCTAGCCACCGCGGTGGCGGCCGGCTAGC
CGGCTAGCCGGCTAGCCCTAGAACTAGTAACGGCCGCCAGTGTGCTGGAATTCGGCTTGTAAGGTACCGG
TGAAGTTCCTATACTTTCTAGAGAATAGGAACTTCGGAATAGGAACTTCTACCTAGATGCATGCTCGAGC
GGCCCCTACAGTTGAAGTCGGAAGTTTACATACACTTAAGTTGGAGTCATTAAAACTCGTTTTTCAACTA
CTCCACAAATTTCTTGTTAACAAACAATAGTTTTGGCAAGTCAGTTAGGACATCTACTTTGTGCATGACA
CAAGTCATTTTTCCAACAATTGTTTACAGACAGATTATTTCACTTATAATTCACTGTATCACAATTCCAG
TGGGTCAGAAGTTTACATACACTAAGTTGACTGTGCCTTTAAACAGCTTGGAAAATTCCAGAAAATGATG
TCATGGCTTTAGAAGCTTCTGATAGACTAATTGACATCATTTGAGTCAATTGGAGGTGTACCTGTGGATG
TATTTCAAGGAATTCTGTGGAATGTGTGTCAGTTAGGGTGTGGAAAGTCCCCAGGCTCCCCAGCAGGCAG
AAGTATGCAAAGCATGCATATCGATACTAGTTTATAAGATCTCGAGCTAGCGGCCGTTTGTTAATTAAGT
CGACGGTACCGTCAAGGCTGCAGTGAGACATGATCTTGCCACTGCACTCCAGCCTGGACAGCAGAGTGAA
ACCTTGCCTCACGAAACAGAATACAAAAACAAACAAACAAAAAACTGCTCCGCAATGCGCTTCCTTGATG
CTCTACCACATAGGTCTGGGTACTTTGTACACATTATCTCATTGCTGTTCATAATTGTTAGATTAATTTT
GTAATATTGATATTATTCCTAGAAAGCTGAGGCCTCAAGATGATAACTTTTATTTTCTGGACTTGTAATA
GCTTTCTCTTGTATTCACCATGTTGTAACTTTCTTAGAGTAGTAACAATATAAAGTTATTGTGAGTTTTT
GCAAACACAGCAAACACAACGACCCATATAGACATTGATGTGAAATTGTCTATTGTCAATTTATGGGAAA
ACAAGTATGTACTTTTTCTACTAAGCCATTGAAACAGGAATAACAGAACAAGATTGAAAGAATACATTTT
CCGAAATTACTTGAGTATTATACAAAGACAAGCACGTGGACCTGGGAGGAGGGTTATTGTCCATGACTGG
TGTGTGGAGACAAATGCAGGTTTATAATAGATGGGATGGCATCTAGCGCAATGACTTTGCCATCACTTTT
AGAGAGCTCTTGGGGACCCCAGTACACAAGAGGGGACGCAGGGTATATGTAGACATCTCATTCTTTTTCT
TAGTGTGAGAATAAGAATAGCCATGACCTGAGTTTATAGACAATGAGCCCTTTTCTCTCTCCCACTCAGC
AGCTATGAGATGGCTTGCCCTGCCTCTCTACTAGGCTGACTCACTCCAAGGCCCAGCAATGGGCAGGGCT
CTGTCAGGGCTTTGATAGCACTATCTGCAGAGCCAGGGCCGAGAAGGGGTGGACTCCAGAGACTCTCCCT
CCCATTCCCGAGCAGGGTTTGCTTATTTATGCATTTAAATGATATATTTATTTTAAAAGAAATAACAGGA
GACTGCCCAGCCCTGGCTGTGACATGGAAACTATGTAGAATATTTTGGGTTCCATTTTTTTTTCCTTCTT
TCAGTTAGAGGAAAAGGGGCTCAGGATCCACTTGCCCAGTGTTCTTCCTTAGTTCCTACCTTCGACCTTG
ATCCTCCTTTATCTTCCTGAACCCTGCTGAGATGATCTATGTGGGGAGAATGGCTTCTTTGAGAAACATC
TTCTTCGTTAGTGGCCTGCCCCTCATTCCCACTTTAATATCCAGAATCACTATAAGAAGAATATAATAAG
AGGAATAACTCTTATTATAGGTAAGGGAAAATTAAGAGGCATACGTGATGGGATGAGTAAGAGAGGAGAG
GGAAGGATTAATGGACGATAAAATCTACTACTATTTGTTGAGACCTTTTATAGTCTAATCAATTTTGCTA
TTGTTTTCCATCCTCACGCTAACTCCATAAAAAAACACTATTATTATCTTTATTTTGCCATGACAAGACT
GAGCTCAGAAGAGTCAAGCATTTGCCTAAGGTCGGACATGTCAGAGGCAGTGCCAGACCTATGTGAGACT
CTGCAGCTACTGCTCATGGGCCCTGTGCTGCACTGATGAGGAGGATCAGATGGATGGGGCAATGAAGCAA
AGGAATCATTCTGTGGATAAAGGAGACAGCCATGAAGAAGTCTATGACTGTAAATTTGGGAGCAGGAGTC
TCTAAGGACTTGGATTTCAAGGAATTTTGACTCAGCAAACACAAGACCCTCACGGTGACTTTGCGAGCTG
GTGTGCCAGATGTGTCTATCAGAGGTTCCAGGGAGGGTGGGGTGGGGTCAGGGCTGGCCACCAGCTATCA
GGGCCCAGATGGGTTATAGGCTGGCAGGCTCAGATAGGTGGTTAGGTCAGGTTGGTGGTGCTGGGTGGAG
TCCATGACTCCCAGGAGCCAGGAGAGATAGACCATGAGTAGAGGGCAGACATGGGAAAGGTGGGGGAGGC
ACAGCATAGCAGCATTTTTCATTCTACTACTACATGGGACTGCTCCCCTATACCCCCAGCTAGGGGCAAG
TGCCTTGACTCCTATGTTTTCAGGATCATCATCTATAAAGTAAGAGTAATAATTGTGTCTATCTCATAGG
GTTATTATGAGGATCAAAGGAGATGCACACTCTCTGGACCAGTGGCCTAACAGTTCAGGACAGAGCTATG
GGCTTCCTATGTATGGGTCAGTGGTCTCAATGTAGCAGGCAAGTTCCAGAAGATAGCATCAACCACTGTT
AGAGATATACTGCCAGTCTCAGAGCCTGATGTTAATTTAGCAATGGGCTGGGACCCTCCTCCAGTAGAAC
CTTCTAACCAGCTGCTGCAGTCAAAGTCGAATGCAGCTGGTTAGACTTTTTTTAATGAAAGCTTGCATGC
AGCACTTTGGGAGGCTGAGGTGGGTGGACTGCTTGGAGCTCAGGAGTTCAAGACCATCTTGGACAACATG
GTGATACCCTGCCTCTACAAAAAGTACAAAAATTAGCCTGGCATGGTGGTGTGCACCTGTAATCCCAGCT
ATTAGGGTGGCTGAGGCAGGAGAATTGCTTGAACCCGGGAGGCGGAGGTTGCAGTGAGCTGAGATCGTGC
CACTGCACTCCAGCCTGGGGGACAGAGCACATTATAATTAACTGTTATTTTTTACTTGGACTCTTGTGGG
GAATAAGATACATGTTTTATTCTTATTTATGATTCAAGCACTGAAAATAGTGTTTAGCATCCAGCAGGTG
CTTCAAAACCATTTGCTGAATGATTACTATACTTTTTACAAGCTCAGCTCCCTCTATCCCTTCCAGCATC
CTCATCTCTGATTAAATAAGCTTCAGTTTTTCCTTAGTTCCTGTTACATTTCTGTGTGTCTCCATTAGTG
ACCTCCCATAGTCCAAGCATGAGCAGTTCTGGCCAGGCCCCTGTCGGGGTCAGTGCCCCACCCCCGCCTT
CTGGTTCTGTGTAACCTTCTAAGCAAACCTTCTGGCTCAAGCACAGCAATGCTGAGTCATGATGAGTCAT
GCTGAGGCTTAGGGTGTGTGCCCAGATGTTCTCAGCCTAGAGTGATGACTCCTATCTGGGTCCCCAGCAG
GATGCTTACAGGGCAGATGGCAAAAAAAAGGAGAAGCTGACCACCTGACTAAAACTCCACCTCAAACGGC
ATCATAAAGAAAATGGATGCCTGAGACAGAATGTGACATATTCTAGAATATATTATTTCCTGAATATATA
TATATATATACACATATACCATATGAAACACCTCTAGGCTATAAGGCAACAGAGCTCCTTTTTTTTTTTT
CTGTGCTTTCCTGGCTGTCCAAATCTCTAATGATAAGCATACTTCTATTCAATGAGAATATTCTGTAAGA
TTATAGTTAAGAATTGTGGGAGCCATTCCGTCTCTTATAGTTAAATTTGAGCTTCTTTTATGATCACTGT
TTTTTTAATATGCTTTAAGTTCTGGGGTACATGTGCCATGGTGGTTTGCTGCACCCATCAACCCGTCATC
TACATTAGGTATTTCTCCTAATGCTATCCTTCCCCTAGCCCCCCACCCCCAACAGGCCCCAGTGTGTGAT
GTTCCCCTCCCTGTGTCCATGGATCACTGGTTTTTTTTTGTTTTTTTTTTTTTTTTAAAGTCTCAGTTAA
ATTTTTGGAATGTAATTTATTTTCCTGGTATCCTAAGGACTTGCAAGTTATCTGGTCACTTTAGCCCTCA
CGTTTTGATGATAATCACATATTTGTAAACACAACACACACACACACACACACACACATATATATATATA
TAAAACATATATATACATAAACACACATAACATATTTATCGGGCATTTCTGAGCAACTAATCATGCAGGA
CTCTCAAACACTAACCTATAGCCTTTTCTATGTATCTACTTGTGTAGAAACCAAGCGTGGGGACTGAGAA
GGCAATAGCAGGAGCATTCTGACTCTCACTGCCTTTAGCTAGGCCCCTCCCTCATCACAGCTCAGCATAG
TCCTGAGCTCTTATCTATATCCACACACAGTTTCTGACGCTGCCCAGCTATCACCATCCCAAGTCTAAAG
AAAAAAATAATGGGTTTGCCCATCTCTGTTGATTAGAAAACAAAACAAAATAAAATAAGCCCCTAAGCTC
CCAGAAAACATGACTAAACCAGCAAGAAGAAGAAAATACAATAGGTATATGAGGAGACTGGTGACACTAA
GTGTCTGAATGAGGCTTGAGTACAGAAAAGAGGCTCTAGCAGCATAGTGGTTTAGAGGAGATGTTTCTTT
CCTTCACAGATGCCTTAGCCTCAATAAGCTTGCGGTTGTGGAAGTTTACTTGTTTATCACCGGTGACGTC
CATGAGCAAATTAAGAAAAACAACAACAAATGAATGCATATATATGTATATGTATGTGTGTATATATACA
CATATATATATATATTTTTTTTCTTTTCTTACCAGAAGGTTTTAATCCAAATAAGGAGAAGATATGCTTA
GAACTGAGGTAGAGTTTTCATCCATTCTGTCCTGTAAGTATTTTGCATATTCTGGAGACGCAGGAAGAGA
TCCATCTACATATCCCAAAGCTGAATTATGGTAGACAAAACTCTTCCACTTTTAGTGCATCAATTTCTTA
TTTGTGTAATAAGAAAATTGGGAAAACGATCTTCAATATGCTTACCAAGCTGTGATTCCAAATATTACGT
AAATACACTTGCAAAGGAGGATGTTTTTAGTAGCAATTTGTACTGATGGTATGGGGCCAAGAGATATATC
TTAGAGGGAGGGCTGAGGGTTTGAAGTCCAACTCCTAAGCCAGTGCCAGAAGAGCCAAGGACAGGTACGG
CTGTCATCACTTAGACCTCACCCTGTGGAGCCACACCCTAGGGTTGGCCAATCTACTCCCAGGAGCAGGG
AGGGCAGGAGCCAGGGCTGGGCATAAAAGTCAGGGCAGAGCCATCTATTGCTTACATTTGCTTCTGACAC
AACTGTGTTCACTAGCAACCTCAAACAGACACCTCGAGTTTCGATTGCTAGCTTCGAACTCGAGCCACCA
TGCAGCTAGAGCTCTCCACCTGTGTCTTTCTGTGTCTCTTGCCACTCGGCTTTAGTGCCATCAGGAGATA
CTACCTGGGCGCAGTGGAACTGTCCTGGGACTACCGGCAAAGTGAACTCCTCCGTGAGCTGCACGTGGAC
ACCAGATTTCCTGCTACAGCGCCAGGAGCTCTTCCGTTGGGCCCGTCAGTCCTGTACAAAAAGACTGTGT
TCGTAGAGTTCACGGATCAACTTTTCAGCGTTGCCAGGCCCAGGCCACCATGGATGGGTCTGCTGGGTCC
TACCATCCAGGCTGAGGTTTACGACACGGTGGTCGTTACCCTGAAGAACATGGCTTCTCATCCCGTTAGT
CTTCACGCTGTCGGCGTCTCCTTCTGGAAATCTTCCGAAGGCGCTGAATATGAGGATCACACCAGCCAAA
GGGAGAAGGAAGACGATAAAGTCCTTCCCGGTAAAAGCCAAACCTACGTCTGGCAGGTCCTGAAAGAAAA
TGGTCCAACAGCCTCTGACCCACCATGTCTTACCTACTCATACCTGTCTCACGTGGACCTGGTGAAAGAC
CTGAATTCGGGCCTCATTGGAGCCCTGCTGGTTTGTAGAGAAGGGAGTCTGACCAGAGAAAGGACCCAGA
ACCTGCACGAATTTGTACTACTTTTTGCTGTCTTTGATGAAGGGAAAAGTTGGCACTCAGCAAGAAATGA
CTCCTGGACACGGGCCATGGATCCCGCACCTGCCAGGGCCCAGCCTGCAATGCACACAGTCAATGGCTAT
GTCAACAGGTCTCTGCCAGGTCTGATCGGATGTCATAAGAAATCAGTCTACTGGCACGTGATTGGAATGG
GCACCAGCCCGGAAGTGCACTCCATTTTTCTTGAAGGCCACACGTTTCTCGTGAGGCACCATCGCCAGGC
TTCCTTGGAGATCTCGCCACTAACTTTCCTCACTGCTCAGACATTCCTGATGGACCTTGGCCAGTTCCTA
CTGTTTTGTCATATCTCTTCCCACCACCATGGTGGCATGGAGGCTCACGTCAGAGTAGAAAGCTGCGCCG
AGGAGCCCCAGCTGCGGAGGAAAGCTGATGAAGAGGAAGATTATGATGACAATTTGTACGACTCGGACAT
GGACGTGGTCCGGCTCGATGGTGACGACGTGTCTCCCTTTATCCAAATCCGCTCAGTTGCCAAGAAGCAT
CCTAAAACTTGGGTACATTACATTGCTGCTGAAGAGGAGGACTGGGACTATGCTCCCTTAGTCCTCGCCC
CCGATGACAGAAGTTATAAAAGTCAATATTTGAACAATGGCCCTCAGCGGATTGGTAGGAAGTACAAAAA
AGTCCGATTTATGGCATACACAGATGAAACCTTTAAGACGCGTGAAGCTATTCAGCATGAATCAGGAATC
TTGGGACCTTTACTTTATGGGGAAGTTGGAGACACACTGTTGATTATATTTAAGAATCAAGCAAGCAGAC
CATATAACATCTACCCTCACGGAATCACTGATGTCCGTCCTTTGTATTCAAGGAGATTACCAAAAGGTGT
AAAACATTTGAAGGATTTTCCAATTCTGCCAGGAGAAATATTCAAATATAAATGGACAGTGACTGTAGAA
GATGGGCCAACTAAATCAGATCCGCGGTGCCTGACCCGCTATTACTCTAGTTTCGTTAATATGGAGAGAG
ATCTAGCTTCAGGACTCATTGGCCCTCTCCTCATCTGCTACAAAGAATCTGTAGATCAAAGAGGAAACCA
GATAATGTCAGACAAGAGGAATGTCATCCTGTTTTCTGTATTTGATGAGAACCGAAGCTGGTACCTCACA
GAGAATATACAACGCTTTCTCCCCAATCCAGCTGGAGTGCAGCTTGAGGATCCAGAGTTCCAAGCCTCCA
ACATCATGCACAGCATCAATGGCTATGTTTTTGATAGTTTGCAGTTGTCAGTTTGTTTGCATGAGGTGGC
ATACTGGTACATTCTAAGCATTGGAGCACAGACTGACTTCCTTTCTGTCTTCTTCTCTGGATATACCTTC
AAACACAAAATGGTCTATGAAGACACACTCACCCTATTCCCATTCTCAGGAGAAACTGTCTTCATGTCGA
TGGAAAACCCAGGTCTATGGATTCTGGGGTGCCACAACTCAGACTTTCGGAACAGAGGCATGACCGCCTT
ACTGAAGGTTTCTAGTTGTGACAAGAACACTGGTGATTATTACGAGGACAGTTATGAAGATATTTCAGCA
TACTTGCTGAGTAAAAACAATGCCATTGAACCTAGGAGCTTTGCCCAGAATTCAAGACCCCCTAGTGCGA
GCGCTCCAAAGCCTCCGGTCCTGCGACGGCATCAGAGGGACATAAGCCTTCCTACTTTTCAGCCGGAGGA
AGACAAAATGGACTATGATGATATCTTCTCAACTGAAACGAAGGGAGAAGATTTTGACATTTACGGTGAG
GATGAAAATCAGGACCCTCGCAGCTTTCAGAAGAGAACCCGACACTATTTCATTGCTGCGGTGGAGCAGC
TCTGGGATTACGGGATGAGCGAATCCCCCCGGGCGCTAAGAAACAGGGCTCAGAACGGAGAGGTGCCTCG
GTTCAAGAAGGTGGTCTTCCGGGAATTTGCTGACGGCTCCTTCACGCAGCCGTCGTACCGCGGGGAACTC
AACAAACACTTGGGGCTCTTGGGACCCTACATCAGAGCGGAAGTTGAAGACAACATCATGGTAACTTTCA
AAAACCAGGCGTCTCGTCCCTATTCCTTCTACTCGAGCCTTATTTCTTATCCGGATGATCAGGAGCAAGG
GGCAGAACCTCGACACAACTTCGTCCAGCCAAATGAAACCAGAACTTACTTTTGGAAAGTGCAGCATCAC
ATGGCACCCACAGAAGACGAGTTTGACTGCAAAGCCTGGGCCTACTTTTCTGATGTTGACCTGGAAAAAG
ATGTGCACTCAGGCTTGATCGGCCCCCTTCTGATCTGCCGCGCCAACACCCTGAACGCTGCTCACGGTAG
ACAAGTGACCGTGCAAGAATTTGCTCTGTTTTTCACTATTTTTGATGAGACAAAGAGCTGGTACTTCACT
GAAAATGTGGAAAGGAACTGCCGGGCCCCCTGCCATCTGCAGATGGAGGACCCCACTCTGAAAGAAAACT
ATCGCTTCCATGCAATCAATGGCTATGTGATGGATACACTCCCTGGCTTAGTAATGGCTCAGAATCAAAG
GATCCGATGGTATCTGCTCAGCATGGGCAGCAATGAAAATATCCATTCGATTCATTTTAGCGGACACGTG
TTCAGTGTACGGAAAAAGGAGGAGTATAAAATGGCCGTGTACAATCTCTATCCGGGTGTCTTTGAGACAG
TGGAAATGCTACCGTCCAAAGTTGGAATTTGGCGAATAGAATGCCTGATTGGCGAGCACCTGCAAGCTGG
GATGAGCACGACTTTCCTGGTGTACAGCAAGAAGTGTCAGACTCCCCTGGGAATGGCTTCTGGACACATT
AGAGATTTTCAGATTACAGCTTCAGGACAATATGGACAGTGGGCCCCAAAGCTGGCCAGACTTCATTATT
CCGGATCAATCAATGCCTGGAGCACCAAGGAGCCCTTTTCTTGGATCAAGGTGGATCTGTTGGCACCAAT
GATTATTCACGGCATCAAGACCCAGGGTGCCCGTCAGAAGTTCTCCAGCCTCTACATCTCTCAGTTTATC
ATCATGTATAGTCTTGATGGGAAGAAGTGGCAGACTTATCGAGGAAATTCCACTGGAACCTTAATGGTCT
TCTTTGGCAATGTGGATTCATCTGGGATAAAACACAATATTTTTAACCCTCCAATTATTGCTCGATACAT
CCGTTTGCACCCAACTCATTATAGCATTCGCAGCACTCTTCGCATGGAGTTGATGGGCTGTGATTTAAAT
AGTTGCAGCATGCCATTGGGAATGGAGAGTAAAGCAATATCAGATGCACAGATTACTGCTTCATCCTACT
TTACCAATATGTTTGCCACCTGGTCTCCTTCAAAAGCTCGACTTCACCTCCAAGGGAGGAGTAATGCCTG
GAGACCTCAGGTGAATAATCCAAAAGAGTGGCTGCAAGTGGACTTCCAGAAGACAATGAAAGTCACAGGA
GTAACTACTCAGGGAGTAAAATCTCTGCTTACCAGCATGTATGTGAAGGAGTTCCTCATCTCCAGCAGTC
AAGATGGCCATCAGTGGACTCTCTTTTTTCAGAATGGCAAAGTAAAGGTTTTTCAGGGAAATCAAGACTC
CTTCACACCTGTGGTGAACTCTCTAGACCCACCGTTACTGACTCGCTACCTTCGAATTCACCCCCAGAGT
TGGGTGCACCAGATTGCCCTGAGGATGGAGGTTCTGGGCTGCGAGGCACAGGACCTCTACTGAGGGCGGC
CGCCACCCCACCAGTGCAGGCTGCCTATCAGAAAGTGGTGGCTGGTGTGGCTAATGCCCTGGCCCACAAG
TATCACTAAGCTCGCTTTCTTGCTGTCCAATTTCTATTAAAGGTTCCTTTGTTCCCTAAGTCCAACTACT
AAACTGGGGGATATTATGAAGGGCCTTGAGCATCTGGATTCTGCCTAATAAAAAACATTTATTTTCATTG
CAATGATGTATTTAAATTATTTCTGAATATTTTACTAAAAAGGGAATGTGGGAGGTCAGTGCATTTAAAA
CATAAAGAAATGAAGAGCTAGTTCAAACCTTGGGAAAATACACTATATCTTAAACTCCATGAAAGAAGGT
GAGGCTGCAAACAGCTAATGCACATTGGCAACAGCCCCTGATGCCTATGCCTTATTCATCCCTCAGAAAA
GGATTCAAGTAGAGGCTTGATTTGGAGGTTAAAGTTTTGCTATGCTGTATTTTACATTACTTATTGTTTT
AGCTGTCCTCATGAATGTCTTTTCACTACCCATTTGCTTATCCTGCATCTCTCAGCCTTGACTCCACTCA
GTTCTCTTGCTTAGAGATACCACCTTTCCCCTGAAGTGTTCCTTCCATGTTTTACGGCGAGATGGTTTCT
CCTCGCCTGGCCACTCAGCCTTAGTTGTCTCTGTTGTCTTATAGAGGTCTACTTGAAGAAGGAAAAACAG
GGGGCATGGTTTGACTGTCCTGTGAGCCCTTCTTCCCTGCCTCCCCCACTCACAGTGACCCGGAATCTGC
AGTGCTAGTCTCCCGGAACTATCACTCTTTCACAGTCTGCTTTGGAAGGACTGGGCTTAGTATGAAAAGT
TAGGACTGAGAAGAATTTGAAAGGGGGCTTTTTGTAGCTTGATATTCACTACTGTCTTATTACCCTATCA
TAGGCCCACCCCAAATGGAAGTCCCATTCTTCCTCAGGATGTTTAAGATTAGCATTCAGGAAGAGATCAG
AGGTCTGCTGGCTCCCTTATCATGTCCCTTATGGTGCTTCTGGCTCTGCAGTTATTAGCATAGTGTTACC
ATCAACCACCTTAACTTCATTTTTCTTATTCAATACCTAGAAAGCTTATCGACCCCATCCTCACTGACTC
CGTCCTGGAGTTGGATGAGAGATAATGGCCTTACGTTGTGCCAGGGGAGGGTCGGGCTGGATTTAGCAAG
ATTTACCTTCTCCAAAGAGCGGTGCTGCAGTGGCACAGCTGCCCACGGAGGTGGGGGGGTCACCGTCCCT
GGAGGTGATGAAGAACTGTGGGGATGTGGCACTGAGGGACATGGCCAGTGGGCACGGTGGGTGGGTTGGG
GTTGGTCTTGGGGATCTTGGAGGGCTTTTCCAGCCTTCATGATTTGACGATTGTATGAACATCTACATGG
CAATTCTCCAGCTGCCTGTCCCAGTCCTACTGACCCAGCTGTATCTCTCCAGGCAAGCTCTTCCACCCCT
TCTGCTTGCATCCAGACACCATCAAACATGCAGGCTCAGACACAGGGACCAGCAGTGTCTGTGGCCTTTT
TGTGCTCCTCTCCATGCTGGGTTTTAACTTGCTCTTTGTCCTTCTATCCTATCTTCTTATCCTTAAGGCT
GTTCTGAACGCTGTGACTTGGAGAGTGTCCCAGAGCCCTCAACACCTGCATGTCCCACGTCCATGCTGTC
CTGCACTTCCTTATCCCCAAGATCTGCCTCTCCGTGATGCACTGAATTGGCAAACATGTGTCACCCCAGA
CCAACAATGTCACAGCAAACTCCCCCTTGATAGGACAAGGGGGAATGGCTTTACACTGAGACAGGGGAGG
TTTGGGTTGGATATGAGGAGGCAGTTTTTCCCCCAGAGGGTGGTGACGCACTGAACAGGTTGCCCAAGGA
GGCTGTGGATGCCCCATCCCTGCAGGCATTCAAGGCCAGGCTGGATGTGGCTCTGGGCAGCCTGGGCTGC
TGGTTGATGACCCTGCACATAGCAGGGGGTTGGATCTGGATGAGCACTGTGCTCCTTTGCAACCCAGGCC
GTTCTATGATTCTGTCATTCTAAATCTCTCTTTCAGCCTAAAGCTTTTTCCCCGTATCCCCCCAGGTGTC
TGCAGGCTCAAAGAGCAGCGAGAAGCGTTCAGAGGAAAGCGATCCCGTGCCACCTTCCCCGTGCCCGGGC
TGTCCCCGCACGCTGCCGGCTCGGGGATGCGGGGGGAGCGCCGGACCGGAGCGGAGCCCCGGGCGGCTCG
CTGCTGCCCCCTAGCGGGGGAGGGACGTAATTACATCCCTGGGGGCTTTGGGGGGGGGCTGTCCCTATCG
ATTACTAGTTTTACCACATTTGTAGAGGTTTTACTTGCTTTAAAAAACCTCCCACACCTCCCCCTGAACC
TGAAACATAAAATGAATGCAATTGTTGTTGTTAACTTGTTTATTGCAGCTTATAATGGTTACAAATAAAG
CAATAGCATCACAAATTTCACAAATAAAGCATTTTTTTCACTGCATTCTAGTTGTGGTTTGTCCAAACTC
ATCAATGTATCTTATCATGTCTGCTCGAAGAGCGGCCGCTTCAGTTTCGGCCAGCAGGCGGGGAGCCCGA
GGTAGCTCCCGCTCCCTTGAGCCAGGCCCCTGCCAGACCTGAGCTCCCTCCCAAGCCTGGCTTCCCCAAC
CGGTGGCCTTCATGGGCCAGAAGCCATTCCTTCACGGCTAGCCCTCCGGAGTAGTTGCCCACGGCTCCGC
TGCTGCAGACCACTCTGTGGCACGGGATGAGGATCTTGACAGGATTGCCTCTCATGGCGCCTCCCACTGC
TCGCGCGGCTTTGGGGTTGCCGGCCAGGGCGGCCAATTGCTGGTAAGAAATCACTTCTCCGAATTTCACA
ACCTTAAGCAGCTTCCATAACACCTGACGCGTGAACGACTCTTGCTGGAAAACGGGATGGTGAAGCGCTG
GCACGGGGAACTCTTCGATAGCCTCGGGCTGGTGGAAATAGGCATTCAGCCAGGCTGTGCACTGCATCAG
GGGCTCCGGACCTCCGAGAACCGCAGCGGGGGCTGGGACCTCCACGGCATCAGCTGCAGACGTCCCCTTG
CCCAGGAGCTTTATTTCGTGCAGACCCTGCTCACAACCAGACAGCTCCAGCTTCCCCAAAGGGCTGTCCA
GTGTGGTGCGTTTCATTTCACAATCCTTGTCCATGGTGGCGACCGTCTAGCTCACGACACCTGAAATGGA
AGAAAAAAACTTTGAACCACTGTCTGAGGCTTGAGAATGAACCAAGATCCAAACTCAAAAAGGGCAAATT
CCAAGGAGAATTACATCAAGTGCCAAGCTGGCCTAACTTCAGTCTCCACCCACTCAGTGTGGGGAAACTC
CATCGCATAAAACCCCTCCCCCCAACCTAAAGACGACGTACTCCAAAAGCTCGAGAACTAATCGAGGTGC
CTGGACGGCGCCCGGTACTCCGTGGAGTCACATGAAGCGACGGCTGAGGACGGAAAGGCCCTTTTCCTTT
GTGTGGGTGACTCACCCGCCCGCTCTCCCGAGCGCCGCGTCCTCCATTTTGAGCTCCCTGCAGCAGGGCC
GGGAAGCGGCCATCTTTCCGCTCACGCAACTGGTGCCGACCGGGCCAGCCTTGCCGCCCAGGGCGGGGCG
ATACACGGCGGCGCGAGGCCAGGCACCAGAGCAGGCCGGCGAGCTTGAGACTACCCCCGTCCGATTCTCG
GTGGCCGCGCTCGCAGGCCCCGCCTCGCCGAACATGTGCGCTGGGACGCACGGGCCCCGTCGCCGCCCGC
GGCCCCAAAAACCGAAATACCAGTGTGCAGATCTTGGCCCGCATTTACAAGACTATCTTGCCAGAAAAAA
AGCGTCGCAGCAGGTCATCAAAAATTTTAAATGGCTAGAGACTTATCGAAAGCAGCGAGACAGGCGCGAA
GGTGCCACCAGATTCGCACGCGGCGGCCCCAGCGCCCAGGCCAGGCCTCAACTCAAGCACGAGGCGAAGG
GGCTCCTTAAGCGCAAGGCCTCGAACTCTCCCACCCACTTCCAACCCGAAGCTCGGGATCAAGAATCACG
TACTGCAGCCAGGGGCGTGGAAGTAATTCAAGGCACGCAAGGGCCATAACCCGTAAAGAGGCCAGGCCCG
CGGGAACCACACACGGCACTTACCTGTGTTCTGGCGGCAAACCCGTTGCGAAAAAGAACGTTCACGGCGA
CTACTGCACTTATATACGGTTCTCCCCCACCCTCGGGAAAAAGGCGGAGCCAGTACACGACATCACTTTC
CCAGTTTACCCCGCGCCACCTTCTCTAGGCACCGGTTCAATTGCCGACCCCTCCCCCCAACTTCTCGGGG
ACTGTGGGCGATGTGCGCTCTGCCCACTGACGGGCACCGGAGCCTCACGCATGCTCTTCTCCACCTCAGT
GATGACGAGAGCGGGCGGGTGAGGGGGCGGGAACGCAGCGATCTCTGGGTTCTACGTTAGTGGGAGTTTA
ACGACGGTCCCTGGGATTCCCCAAGGCAGGGGCGAGTCCTTTTGTATGAATTACTCAACTAGTGATATCT
TAATTAACAAACGGCCGCTGCATTCTAGTTGTGGTTTGTCCAAACTCATCAATGTATCTTATCATGTCTG
GATCCCATCACAAAGCTCTGACCTCAATCCTATAGAAAGGAGGAATGAGCCAAAATTCACCCAACTTATT
GTGGGAAGCTTGTGGAAGGCTACTCGAAATGTTTGACCCAAGTTAAACAATTTAAAGGCAATGCTACCAA
ATACTAATTGAGTGTATGTTAACTTCTGACCCACTGGGAATGTGATGAAAGAAATAAAAGCTGAAATGAA
TCATTCTCTCTACTATTATTCTGATATTTCACATTCTTAAAATAAAGTGGTGATCCTAACTGACCTTAAG
ACAGGGAATCTTTACTCGGATTAAATGTCAGGAATTGTGAAAAAGTGAGTTTAAATGTATTTGGCTAAGG
TGTATGTAAACTTCCGACTTCAACTGTAGGGGATCCTCTAGGGCCGCCAGTGTGATGGATATCTGCAGAA
TTCGGCTTCAGGTACCGTCGACGATGTAGGTCACGGTCTCGAAGCCGCGGTGCGGGTGCCAGGGCGTGCC
CTTGGGCTCCCCGGGCGCGTACTCCACCTCACCCATCTGGTCCATCATGATGAACGGGTCGAGGTGGCGG
TAGTTGATCCCGGCGAACGCGCGGCGCACCGGGAAGCCCTCGCCCTCGAAACCGCTGGGCGCGGTGGTCA
CGGTGAGCACGGGACGTGCGACGGCGTCGGCGGGTGCGGATACGCGGGGCAGCGTCAGCGGGTTCTCGAC
GGTCACGGCGGGCATGTCGACAAGCCGAATTCCAGCACACTGGCGGCCGTTACTAGGTAGCTAGCTCGAG
CCTTCGAAGATCTCCTAGGGAAGTTCCTATACTTTCTAGAGAATAGGAACTTCGGAATAGGAACTTCACC
GGTGGGTGAAAAGCCGAATTCTGCAGATATCAAGCTTATCGATACCGTCGACCTCGAGGGGGGGCCCGGT
TAGATCCCCGGGTACCGAGCTCGAATTCATCTATGTCGGGTGCGGAGAAAGAGGTAATGAAATGGCATTA
TGGGTATTATGGGTCTGCATTAACGATAGCTAGCCTCTAACTCCTAGACCGTCAGAACTGCTGGGCCCTT
CAAGACGGGCTGCTCACACCCACTCATGTTAAGCCTGGTGAGGCCTGTACTCTGTTTTCACAGGAAGAAA
TCCTCACCCAGTCTTCCCCAAACACATTCCCAGGTTGTGTCATTAGTGGGATAGAGATGATTATTGTGGG
GAGAAGAGAAACATCTGGATGGATTTGGTTAGGTTGATCTATAGAGGAAGTAGGTGCTGCCTGAGGTAGC
TGTAATAGAAGCTAAAGGTCAAAGGAGAGGGCCCTGTCCCAATCCAGATGACTCCACTTCTGCTGGACCC
AGGTTCACAAGCTTAATCTACATTTCACCTAAATTTGGCTAACAAGCCCAAAATCACACAGGCAAAGGGA
GAAGTGGAGGCAGAACCGAGGTTGGAGGCCACCAGGGCCACCGGGCAGAGATCATTTAAGCCCAACCTTC
TCACTTCTCCCTGGGCTCTGCCTCTCTTAAAGGACCTTGTGGTGTGACCTCTTGTAGGTCCCTTTCACAC
TCGGGGCCTCAGTTTCCCCACTGTAAAGTGAATGGGTCCCAGCTTTGGTAAGCTTATGCTTACCTGATGC
TTTCTTCCTGGGCTGCTCTTGTAGAGAAAAGATAAATCTTCTTCCTCCATCCACGAGGGCTTCTTTCCCT
GGGGGTGAGAGTAGGCTGAGGAGAGCCACTTGCACACACTCTTAAAGAAAGTATTACCTGCACCAGCTCA
GTGAGAGGCACAGATCAGACTGTTACTTGAATCAAATTATGAGCCTCCCCAAATATATCTATGACATTTA
AATAGGGGATTACTTGAACATAGACTTTGGGATCCGGTGTGGAGTGCAGGAGACTAGCAAAGTGAATCCT
GAGAGTAGCAGGTCTGCACCTGTTGGATCGAGAAAGGCGGCCTACAATTCTGGTCAAATGAGCTGTGCTT
ATTGACATATTCTATTAGAGAGTACTACCAGGTCACCAGTCACCAGAAAGGCTGCCAGCTCTCCAACCAC
CTCCAGGGAACTATCCTGAATGGGGCCTTAACAAGCCTAAGAGAGGGTTGGTTTGGGTCCCAAGCCAATA
TTTGCTCTGCTTTATGTCAGTCATATGGAACCCAAACCAACCCTCTCCTATGTGCCTCACCAGTCGGTGC
AGGGATCCCAATTTCAAGTTTGGTTTTTTATGGTCAAAGTCCAGCATAGATTAAATGAAGGGGTGTGATG
ATGGTGTTAAAAGAGAACTCCAGACCAGTTTAACTCTTGGACACACATCCCATCTCACCATGGTGCTTCC
AACCTTCCAGAGATGATGGGCTCCTATTTTCTGATGACAAAGCCCTCCACAGGATTGCTGCCTGGCCATC
AGGGAGTGCCTCTGTAACTGAGGCTGAGATCCCACTTTCAGTCCTCCAGCTGTGGCCCATCCCTGCTCCG
CCCACCGGGTATGGCCTGTCCTAGGCTCTTAGGTATGGCTGCATTGTGAAATGATGGCTACAGAGCTGGC
ATCTCCTGTAGTCTGGTTCATCTAGTGCACTACCTCATAGTTAAAAGAAATCTGTTTAAGCCACTGAGGG
TGGCTCCTAGTGCCAACTCCAAGAACAGGAAGCTTCCCTTTTTTGGGAGGAGGGGCAGATGGTAACATGG
ATCGTCCAGGTCAATGGGAGCAGGGCAACCACAGTAAGTACTGGACAACAACACAAAACTCCATGTGTGG
CTTCCATCGAGTCCCTCTCCAATTGGTTTGGTCTTCTCCGTCCCATGCAGCACTTTAGCAAGGGGCCTGG
CTGAAGGCTATGAATTGTGTGGAGCCTCCTCATTGCAGTCTCCAACCATCTGATGCTGGGAAAATGTCAC
CAGGATGCAGCCATGCCGTGTGGCCAATGAACCGAGAAAACACCCCTTTTCTAGAATGCTCTAAAGAGGC
AGAATAATCCAGAGGTGAGGAAGGAAATACTCCACCAGAGACCCAGGCAGTTCCTACAAAAGCCAGACTT
TCCTTCACCTAGGGAGTGACAAGACCAGTGGAAAACACTCTCAAGCAGTAACCCCCAAATGCTCTGCAAG
CCAGTGGCGTCCAGATACCGCACAAGCGAGTGGGCTGTCTAATCCCATCATCATGATGTAAATATCTCTA
GGCTGCCCTGGGCTGTGCCTGACCCTGTCTTCAGCTTTCCACACCTCCACCTACAGCCCATGCACAGAAG
GACCACCCAGGAATGCTGCAAGTGTGGCACCTCCAGGGCCACCCAGGGAGAAGGAGGGCAGCTATGCTGG
TGGCTCCAGGGGTGGTACCTTCACACCACAAAGCCCAAACTGAGGCCCCAGATTTGGCTGATGAGGGCAT
ATTGGACAGGGGTCACTTATGCTCTTCCCCATTGCCACCTGGCCTCTGGCTACCTGGACTTGGCTACCTG
TGGATCCTCTCACAGGTGCCACCATCTTGGCTGAGTCTCCAGATGCGAGGTCCCTGAGGCAGTGGCAGGC
TTCTCGCTAATGCTGATGGGATTAGGAATGGGATAGGTGGGGAGGGCCCTGGACTGGGCCCTGATGAGCC
AAGTGGGTTTTTAGAGGGGCTACTGGTACATTTCAGGGACAGGACATCTGGTAGAGCTAAGCTGGGGCAA
TAAGGAGCCACTGCTAATCTGAGAGCTAGAAACAATCAGCTTCTGGGTCATTATTAATTAGGGTAGTTTG
GGCTGTGTGGAAGTCACGTACTATATGGGGTAGCCACAGCTCTCTCTACAGATAATCTCTAAGACTTCTG
ATTGGGACCGTGTGAATGCAGTAGCAATATCTCTTCTTACTGCCAGGCCCTGCCAGTCCTGCCTCCACGC
CCTGGCTGGCCCCCCTTATGATCTGACCCATGCCAGGCTGCCATAGTATGTTACTTCTGCATTAGCACTC
CTTGGGACCTGCCTCTCCACTGTCCCTCAGACTTTAAAGAACTATACAAACCCAAGGGGCTCTTCCCAAG
AGAATTGATATGACTTGAGGTGATTCCATTTCTGGAAGTAGTCACTCCATTTTCTGCCTCACTCTTTCAG
TGCTTCACAGAGCAGGTTCGAACGAAGGAGCCATCCAACTAACCGTCATGTTCGGGCAACCGAAGAAGGG
AGTGGCAGGATTTCCTTTGGAGACTTCTGGAATTAGACAGCAGTTTAATGCAAGCATCTAAATTCTCTTC
CTCCCAGAGTCTCATTAAAACTACAGTAAGAGTTTGTGTTTTGTTTTGTTTTTAAAGACAAAATCCCACC
AGGATAGAGAGAATAGGAGAGGAGATAACAGCATCATAATTTATGAAACTAAAATGCAGATAGACCAGGA
TTAACTGACTACACAGCACCAAGGAAGCTGAATCACAAGACAGCAGAGGAGAAAACTGGAAAGGATCGTG
GTCTATACGGCAGAATCTTCCCAAGCCTCAGGAGGAGGAGCTCTAGATGTTCCCAGATCTGGGAGGTAAA
GTGGAATGGGGGGACATGGTCAGCGTAATGGGGTTGGGCTGGAAGCTGGTTAAGGAGCAGGCAGATCTCT
GAATCCCCTCTCTGACTCTGTGTCCCCAGGCATCTGCCTGTCCCCCACCCTGGAAGAGGTCTGGCTTGAC
CCTTTGTCTGGTGAATTTCCTGCTCTGCTTTCCTGGTCCTGCTGGCCAGATCAGTGGAGGCCACTCACTT
CACCCCACAGGGATGTTCTGTGTTGCCCTACACCTGGGAACTGGAGGTACTGGAGGCAGGCTGTGGTGAG
CTTGAAAGCAAAACACAGAGGGCAGTCCAATCTCTTTGGCCATATTTCTTCTGCATATCCAATACCATGT
CCACAACTCTGCTAGTGTCCTGATGGTGGTGGGCTCTACACATTCCCGGGAAGCTGAAGGCAGATAATGA
CCAGGACAGGTCAACCTCTCTTCTTCTGAAAGCCTTCATCTACTAATGGCCTGGGACTCTTCCCTTAAAT
GCTTAGATTGTGTCTTCCACTAAGGTTTTTTGCTGTTGCTGTTGTTTGTTTGTTTGTTTGTTTGTTTGTT
TGTTTTGAGACGGAATCTCACTCTGTCGCCCAGGCTGGAGTGTAGTGGCACAATCTCAGCTCACCACAAC
CTTCACCTCCTAGGTTGAAGGGATTCTCCTGCCTCAGCCTCCTGAGTAGCTAGGATTACAGGCACATGCC
ACCATGCCTGGCTAATTTTTGTATTTTTAGTAGAGACAGGATTTCGCCATGTTGGCCAGGCTGGTCTTGA
ACTCCTGACCTCAGGTGATCTGCCTACCTTGGTCTCCCAAAGTGCTGGGATTACTGGTGTGAGCCACCAC
ACCCGGCCAAGGTTTTTGTTTGTTTGTTTGTTTGTTTGTTTTGTATTGAGGCAGGGTATCACTCTGGTCA
CCCAGGCTGGAGTGCAGTAGTGCAATCACGGCTCACTGAAACCTCCACCTCCCTGGCGGGCTCAGGTGAT
CCTGCCACCTCAGCTTCCCAGGTAGCTGGGACTACAGGCTTGTACCACCACTCCCAGCTAATTTTTGCGT
TTTTAGTAGAGACAGGGTTTCCCCATGTTGCCCAGGTTGGTCTCAAACTCTGGGCTCAAGCGATCTGCCT
GCCTCAGCCTCCCAAAGTGCTGGGATTACAGGTGTAAGCCACCGTACCCGGCCCCGCCACTAAGGTTTTG
AAAATGAAGCAATTACAAGTTTAAGTCTATTAATAAGTGATGAAGCTATGTAGAAAAGCAGAATAATTAT
CTTGGATCAGGAAGGTCACATGAGGATCTACTTGGGGGTTGTCAATATTCTATTTCTTGACCTGATCAGT
GTTGACAGCAGGTTTTAATTTTTTACTTCTTTTTGTTTGTTTGTTTTTGAGACGGAGTCTTGCTCTGTCT
CCCAGGCTGGAGTGCAGTGGTATGATCTCGGCTCACTGCAACCTCCGCCTCCTGGGTTCAAGCTGTTCTC
CTGCCTCAGCCTCCCCAGTAGCTGGGATTACAGGCAGGCACCACCACGACCAGCTAATTTTTGTATTTTT
AGTAGAGACTGGGTTTCACCATCTTGGCCAGGCTGGTCTCGAACTTCTGATCTCGTGATCCGCCCTCCTT
GGCCTCCCAAAGTGCTGGGATTACAGGCTTGAGCCAGCGTGCCCGGCCCATTTTTTACTTCCTTATTAAA
CTGTACATATAGGCCTTGCACACTTTTCTGCATCAATGTTATATTCCACAATAAAGGGAAAAGGTATATA
CACAACTTGATACCAGTAATGTGAAACATATATTTCTACATAGAAAAAAAAATGACTGAAATACTGCACT
CCAATGTGTTCACACAGTAGTTGTTTCTGGATTATTTATATATTAAATGTTTATATATTGTATTATGCCA
TGAGGTTTGTGTTTTCTCTCCACTTTTCTGCATTTTCCAAGTTTACTACAAAGAGCACATATTACTCTTA
TAATCAGAAAGTCATAAAATATATTTAAAAAGACAAAATTGAAACTAATAAGGATCAACACAAAACAGAT
GAGCCATCTGTGGAAATCCGCACAGAATACTACCTAAAGAGATTGGTGACGTGCATGATCTCACTAGGAT
GAGCACAAAGCTTGCCAGAGCCTAGGGTCTATTTCTAGGGTTGGCTCTTGGAAGCCAGGATAGTTGTTAT
CTCTGGGAAGAGGGAGGGGCACACAAGGGGCTTCTAAAACATTCTGAATGTTCTATTTCTGAACCTGGTT
GGTGGGTACATGACTGTTGGTTTTATTATTATATGTTTTATATACTCTTCCGTATGTATGGTGTGGATTC
CAAAAAAAGATTTCCTTTAGAGAAAACCAGAATCACATAAGTAGAAAATATGGTGCTATGTTGAAGGAAC
AACTCAAGTTTATATAAAATCATCATCATTTATAGGCTTAAAAAGTTGCTTTGGAATTTTGGTCTAACTG
ACTTGTCTTTTCTGCAGCAAACCACGCTCCTTCTGGACGTGCTCCAGGCAGAGGGGATTAGGGTGGGTTC
AAGGCTGCAAGTACCTAGCTCAGCACACTCTCTTCAGGGGACTTAGAGTTTGTCTGGTGTTGGCTCTCTG
AGCTCTTGTCAGGAATGCCGACCCTTCCGAGGTTCAGGATTTGAAGCCTGCCTTCCCACCCCAGATTTGG
TCCACACAGACACTCAAGTATGTATTTCAACTACAAATGACCTGTACTTTCCTATTACTCCTCTCTTTCA
TGGTAACCTTTCTGGTATCCTTCCTTCCCTACATTTATGGGAGGGGGACATCATTCTCTGCTCTCCTGTC
ACTGAAGGCTCCACCTTCTGTCTTCTTCTGACCCATCTGGTTTTCCTGGGGCCACCTCCTCTCCTTACCA
CCCTAACGCTTTTGTAACTTGAGGAGAAATGAGAGATCACCTAGTCAGGTCATCATTCTCTGTAGATGAA
GAGGCCCAATGGTTTGCTCAAGAATTGCCAAGCGAGTTAAAGACAGAGAGTATGAGAGTCAGCAAGACCT
ACAGAAAGCATCTATCTGCACTGTTTTGCAGGGACTTAGCCTTTGTGTGTGGACTCCTGGAATGCCACCC
ACTAAGAAACATTGTCTGACACCAACTCCCCACTTGGTAGGTGGGGACACTGAAACTCATGGCAGGAAAG
GGCCTTGCCCCAAGCCAGGGCAGAGTGTCACTCATCACTCTCAATTTTCAGTCCAGGGCACCTTGTTGTG
ACTATCCCAAAGGCAGCCACTTTCCCTGGTCTGAAAGACCTGAAGAGAGAAGAGAAGAGAAGGATGGAAG
GCAGAGTATGCGGCTTTGATTCATTTCCTGGTGAAAACAGATCTATACGAGAAGCAAATTTCACGAAAGG
GAAGAGAAGAAAGTGTCCCATACGTTGCTGGCCTGTTTCAACCTTGCTTTGATTCTTGCTGAAAAGGGTA
CCGTGTATTTCTGAGTTCAACATGCAGACCAGTGTTAGGAAAGCCACTGCACCTCCACTTTAGCCTCCAG
GGCTGTGCCCTGCAAATGGCCTGCAGCCTTGGTGCCTCGCTCTCCAGACTGCATTTTGGAAGATGGGACA
GAGGCTTATGGAAGCCCACATTAGAACGGGGGAGCAGAATGGGTGAGATGAGGGATCCTTGATAGTGAAC
CAGATGAAGGAATGGTAGCCAAATGCCAGGCCTCCTTTGTGGCTTCAATCCAAAGGCTCTGGAGCCCTTC
CAGGGCAGAACATCAGGCATGTTTACCCCCACTGTCCTCAACAGTGACAGAGGTGCAATCTTGGGCAGCT
GGCCATTTTGAAAGCAACCTCCTTAATCTCAACTGGGAAGGCTCCCTAGCAGGACCCCTGTGTTGCACAC
CTGGAGGAAGCTAGACTAACCAGAAGCTCAGCACGGTTCCATCTGGGATGCCCAGGTCTGAGACGAAAAA
GGTAACTCTCTTTTCTGGGTCCTGGCCCAGTTGTGTCTCTCTCCACCTCATTCTCTGAGATGCCTGTCTC
CCCTTTTTTGTCCCATCAGGAGGCAAGAGCTATCACTGGGCCAGACTCCACCAGAAGCCAAGCCAGCTTG
TTACCCAGCTTCTCAGGGAGCAAAGAACAGCCTTGTTTCTATCTTATCCCCACTGTCCCCTGCCCCTGCC
CCACCTCCCAGCCATTCAGCTTCTGGCTTCCCCAGAGCTGCCTGCTTCTTTGTGGTCCTCCATTCCTTGA
AAAGACCTTCTAGTCATTAGTGTATATAAATGGCCACTTAGCCCAGATTACAGTGAGGTCAACAGCTGGG
GCTCTGAGAATTGTCACACACTGGCACAGGAGAGGAGGCTATTCTTCCAGAGAATTTGGAGGGCACTCCC
ATCCACTTACAACAAAAAGCCCATCCACTGTGCTTGGCAGTAGGTGATCTGAGAACCAATGGAACCAGGT
TAATCCTGTGGCACTGTTGAGTGAGGAGAGCAGTGGCGGGCACTGGAAAATATCAGAGACAAGGCAGGAG
ACCTGAAATCTAGGCTTAGCTCCTCATATACTTGGCAGCTGTATGACCTCAGACAACCAGTGTTACCTCT
CTAAGCCTCAGTTTCCTCATGCAAAAGGAGGGGGAATAACAACAGAGCCCACTGCTTGGGGGTGTTGTGA
GGACAGGATGAAAAAACAAACAGAAATCCCTCAGTACAGGATTCAGTGCAGTGGACAGTCTTGCAAGGTC
TGGTTCAGCCCTCCACCCCTACCCTCACCAGTATAAAGAACTCTGGCCTACAAGTCAGATGACCTGAGTT
TTAATCTCAGCTTTGCCATTAGCCGTGTGAACTTGAGAAAGTCCCTTTCCTTTTTACATCTATTGGGATG
ATCATGCATTTTTTGTCCTTTATTCTGTTAATATAGTGTGTTACATTGATTGCTTTTCATAGACTGAACC
AGCCTTGTATTCCAGGGATAAATCTCACTTGGTCATGGTGTATAATCCTTTATACAAATGTTGCTGGGTT
GAGTTTGCTAGTATTTTGTTGAAGATTTTTATGTCTTGATTCATAAGGAATATTGGTGTACCTTCCCCTT
TTATGGCCACAGTTTCCCTACAATGATGTAGTCGAACTAGACAACCTCCAATATCTTTCAGTATTCATGT
CCTCTGATTCTGTGAAACTAAGAAAATTAAGAAATAGTGATTCATAGGCACAAGGCAGGCAAAACTTAGA
CTCCTTGTAGAATAATTAGGAAGCCAAATATTCAGTGTGCTTATTTCTCAAATAACCTTAGTTTCTCCAG
TCTGCCCCAACTCCGAGGCCTGAATATCTCTAGATGCTTATGATGGCAACTAAAGCCTAAAAGCTAATTC
ATTTTAAAGTTCTTCCAAATGCATAGGGTTTTATTTTTCCAGACCTGGGTTCAGATGGGGAATTTGACAA
ACAATGGAAAGGGGGAAAAACAACAATCTAAACACTGAGTGACAAAGTAACAAAGAAATAGTCTAGCTAT
CAGCCAGTCAAGCCAGCCTTGGCTTTGCTATCCAAAGTAGTCAGTCTAATTCTACCACCAGTTTCTGTTC
CTGTAGCTGTCTACTGCCTGCCAGGGACTCTGCCTTCCCACCCACAACTACCAATGGAAGGATGTGGTGA
CCATACCAGTGGCTGCTGACATCTCCTGCCATGGGAAGCATAATTGCCTCCAGCAGCCTCCCCCTTAGAT
CCATCATTTTTGTTGCACTTGGCCTGGGCTGTACTCCCGGCCAATGACTGAACATGGTGAGCATAGTAAT
GCAGGCCCATTTCTGTGAGGAGCAGGACTCCTCCAGTAGGTGACTTTGGCTCAAGGACTCTCTATTGGCC
TGGTTGAACTTTTCCTGAACTGTGCTACTGTCTGAGACTCTTCTTACCCAATCCTCTTTCTCGCCCCAAT
TGTCACAGACCACCTGCATTGTGGTCTGAGTCTCTCCCCACCTTCTCTTGCTCTTCCCTGTTTATCTTTC
ACAGGCATTTCCCCCAGTACATTCCTTGAATGTCTAACCCGATACGGGTGCCTGACTTTTGGCAGACCTA
AGCAGACAAAAAGGAGTACTTGGTTACCTAGCTCTTCTTTCTACCACAAACATCGAGGGAACCCTTTTTC
CCTCACCCCTCTGCCACACCCCCACTGCCCCAGTGAACAACCACAGAGAGAGCTGTGGTATAATATTAGG
CTGGTGCAAAAGTAATTGCGGTTTTTGCCATTACTTTTAATGGTAAAAACCGCAATTACTTTTGCACCTA
CCTAGTATTTGTGTCCCCCCAAATTCATATGTTGAAACCTAACCCACAATATGATGTCATTAGGAGGCAA
GACCTTGAGGAGGTGATTAGATGATGGGGTGGAGCTCTCCTGAATGAGATTAGTGCCCTTATAAGAAGAA
GCCCAAGGAAGCTACCTTGACTCTTCCATCACATGAGAATGCAGCAAGAAGGCACCATCTACTAATCAGG
AAGAGAGCTCTCACCAGACACTGAATCTGCCAGTGTCTTGATCTTGAAGTTCCCAGCCTCCAGAACTATG
CATAATGCATTTCCATTGTCTCTAAGCCACCCAGCCTATGGTATTTTGTCATAGCAGCCTGAACTGACTA
AGACAGTGAGCCACATGAGAAGTGCCCCAACCCCTCCCTTAAGCACTTGGCTCACAGATCAGTGGGTTCA
TTTCTGCCTGAGTTTTATTGTTATTCTGTAGATTTCTTGGGCTAGATATATTTTTCTGTTATTTTCCTTC
TTCACCTCAGTCATGAATTGGTTGTTTTAAAAAAGACAATGTAAGTCATGGGGAAACTCCTGACAACTCT
ACTCTCCTAGGGTTCCTGATAAAAGGGGATTCAGTTGAGTCCTCTGATGGTCTCTACCTGCCAAAGTCCA
GCAGCCCTTAGCAAACATGCTGCTCGTTTCTGTAGAGAAGGTGCTGGTGTCCCACCATACTTCTCTCTCC
CTCATGAAGGGCTTGCGACCCAGCAAATGGGTGGCTTATATGGGTCTGTTTCAAAGGAAGAGCCAGCTCT
GGGAAGAAAAACGATGAGCATAAGCATAACCTACCACTGTGCCTGGGAAAGCAGACAACTTTTTTGATGT
GTGAATATCTAATGAGAATGGAATCCATCAATTACCTTAAACTTAGGCACAGTCTTCAAATTCAATATAT
GTGGGATATACTTTTAGTCAGTTTGTAGACGTTATTTGTAATAAATAATCTGGCTTCTCTAAAGAAATTA
TTTTAAGTGTTTGGTTTGGTTTGATTTAATGGTAAAATTATATTTAGTGGCAGAGAATTATAGCAATGGT
GATAAACTATAGAGTGTCATAAGTTCATATCTTATTCTCACATTTGAAGCTGCCTGCAGATGCATTCAAG
ATGCAGCCAGAAGTCAGGAGACTCAGGCTGTTATTTGGAGCTCATCATTTTACAGCCTTGCTGGACTCCC
ACTTTCTCAGGGGAAAAATGTGGTGTTGACCCAGATTAGCTCTCCAGGCCCTGCTGAGTTGGGCACTCTG
TAAGCTGGAGGGTCTTCTATTGTCTTCACCTAAGTGTCAATCAACAACCCAAATGGGCATGGGGGAAGAG
GGAGCTGGGCCAATGCCCAGGGTGCCTGGTAGAGAGATACCTTGGGCACTGGAAGGCACCAGCTTCCCAG
AGAGAAGGGGGAGGGCCATGAAAAAGTTGGCTGTAGATGCCAGGGACACTGGGACTCTCCAGCTGTGTGT
TTGTGCCTTCTGAAGACTTATGTTTCATTCCTTTGGAGCATGCATAATCATACACTGTGGGATGTGTTAT
ATAGATTGCTTGATAGTTCACCACTGTAATAAAATACTGTGACTGGAATCTGCTCCCAGTCTGCCTTTGA
TAGCACTTGTGCAACACACATTTACTGAGCATTTACAGTGATCCAGGACCTGTGTTGTGAAAACATTGAT
GGACAAGGCAGATGGTGGAGCACGTCAGTGAGGATTTTTAACAAAGGCTGGTAAGTGCTATAAAGGAACA
TTGTAGGACACTAGAGAACAAAGAACAGGAGAACCTGACTTAGGCTGGGGTGGGGCGTTGGTTAGAGGAG
GCTCCTTGGAGGACATGAGGTTTAAGCTGTGACCTGAGGATGAATAGATGTTGGCCAGTGAGGTTACCTC
AAATCGTCACTTCCGTTTTCCCACGTTACGTCACTTCCCATTTTAAGAAAACTACAATTCCCAACACATA
CAAGTTACTCCGCCCTAAAACCTACGTCACCCGCCCCGTTCCCACGCCCCGCGCCACGTCACAAACTCCA
CCCCCTCATTATCATATTGGCTTCAATCCAAAATAAGGTATATTATTGATGATG (SEQ ID NO:
179)
The nucleotide sequence of WL-PS1

| | |
|---|---|
| 1-->178 | Start: 2582 End: 2759 |
| loxP | Start: 2768 End: 2801 |
| 179-->344 | Start: 2808 End: 2973 |
| loxP | Start: 2974 End: 3007 |
| 3112-->27435 | Start: 3016 End: 27338 |
| lambda-1 | Start: 27393 End: 29862 (Complementary) |
| BGH polyA | Start: 30176 End: 30390 |
| copGFP | Start: 30415 End: 31080 (Complementary) |
| CMV | Start: 31127 End: 31779 (Complementary) |
| lambda-2 | Start: 31831 End: 33360 |
| 30544-->31879 | Start: 33421 End: 34756 |
| Ad5E4orf6 | Start: 34752 End: 35866 |
| 32972-->34794 | Start: 35864 End: 37686 |

taaacttggcgcgccctgagtgatttttctctggtcccgccgcatccataccgccagttgtttaccctcacaac
gttccagtaaccgggcatgttcatcatcagtaacccgtatcgtgagcatcctctctcgtttcatcggtatcatt
acccccatgaacagaaatcccccttacacggaggcatcagtgaccaaacaggaaaaaaccgcccttaacatggc
ccgctttatcagaagccagacattaacgcttctggagaaactcaacgagctggacgcggatgaacaggcagaca
tctgtgaatcgcttcacgaccacgctgatgagctttaccgcagctgcctcgcgcgtttcggtgatgacggtgaa
aacctctgacacatgcagctcccggagacggtcacagcttgtctgtaagcggatgccgggagcagacaagcccg
tcagggcgcgtcagcgggtgttggcgggtgtcggggcgcagccatgacccagtcacgtagcgatagcggagtgt
atactggcttaactatgcggcatcagagcagattgtactgagagtgcaccatatgcggtgtgaaataccgcaca
gatgcgtaaggagaaaataccgcatcaggcgctcttccgcttcctcgctcactgactcgctgcgctcggtcgtt
cggctgcggcgagcggtatcagctcactcaaaggcggtaatacggttatccacagaatcaggggataacgcagg
aaagaacatgtgagcaaaaggccagcaaaaggccaggaaccgtaaaaaggccgcgttgctggcgtttttccata
ggctccgcccccctgacgagcatcacaaaaatcgacgctcaagtcagaggtggcgaaacccgacaggactataa
agataccaggcgtttccccctggaagctccctcgtgcgctctcctgttccgaccctgccgcttaccggatacct
gtccgcctttctcccttcgggaagcgtggcgctttctcatagctcacgctgtaggtatctcagttcggtgtagg
tcgttcgctccaagctgggctgtgtgcacgaaccccccgttcagcccgaccgctgcgccttatccggtaactat
cgtcttgagtccaacccggtaagacacgacttatcgccactggcagcagccactggtaacaggattagcagagc
gaggtatgtaggcggtgctacagagttcttgaagtggtggcctaactacggctacactagaaggacagtatttg
gtatctgcgctctgctgaagccagttaccttcggaaaaagagttggtagctcttgatccggcaaacaaaccacc
gctggtagcggtggtttttttgtttgcaagcagcagattacgcgcagaaaaaaaggatctcaagaagatccttt
gatcttttctacggggtctgacgctcagtggaacgaaaactcacgttaagggattttggtcatgagattatcaa
aaaggatcttcacctagatccttttaaattaaaaatgaagttttaaatcaatctaaagtatatatgagtaaact
tggtctgacagttaccaatgcttaatcagtgaggcacctatctcagcgatctgtctatttcgttcatccatagt
tgcctgactccccgtcgtgtagataactacgatacgggagggcttaccatctggccccagtgctgcaatgatac
cgcgagacccacgctcaccggctccagatttatcageaataaaccagecagecggaagggccgagcgcagaagt
ggtcctgcaactttatccgcctccatccagtctattaattgttgccgggaagctagagtaagtagttcgccagt
taatagtttgcgcaacgttgttgccattgctgcaggcatcgtggtgtcacgctcgtcgtttggtatggcttcat
tcagctccggttcccaacgatcaaggcgagttacatgatcccccatgttgtgcaaaaaagcggttageteette
ggtcctccgatcgttgtcagaagtaagttggccgcagtgttatcactcatggttatggcagcactgcataattc
tcttactgtcatgccatccgtaagatgcttttctgtgactggtgagtactcaaccaagtcattctgagaatagt
gtatgcggcgaccgagttgctcttgcccggcgtcaacacgggataataccgcgccacatagcagaactttaaaa
gtgctcatcattggaaaacgttcttcggggcgaaaactctcaaggatcttaccgctgttgagatccagttcgat
gtaacccactcgtgcacccaactgatcttcagcatcttttactttcaccagcgtttctgggtgagcaaaaacag
gaaggcaaaatgccgcaaaaaagggaataagggcgacacggaaatgttgaatactcatactcttcctttttcaa
tattattgaagcatttatcagggttattgtctcatgagcggatacatatttgaatgtatttagaaaaataaaca
aataggggttccgcgcacatttccccgaaaagtgccacctgtctagctacgatatcctgtttaaacatcatcaa
taatataccttatagatggaatggtgccaatatgtaaatgaggtgattttaaaaagtgtgggccgtgtggtgat
tggctgtggggttaacggttaaaaggggcggcgcggccgtgggaaaatgacgttttatgggggtggagtttttt
tgcaagttgtcgcgggaaatgatttaaatataacttcgtatagcatacattatacgaagttatggatccttacg
cataaaaaggcttcttttctcacggaactacttagttttcccacggtatttaacaggaaatgaggtagttttga
ccggatgcaagtgaaaattgctgattttcgcgcgaaaactgaatgaggaagtgtttttctgaataatgtggtat
ttatggcagggtgataacttcgtatagcatacattatacgaagttatatttaaataggaatgtttatgccttac
cagtgtaacatgaatcatgtgaaagtgttgttggaaccagatgccttttccagaatgagcctaacaggaatctt
tgacatgaacacgcaaatctggaagatcctgaggtatgatgatacgagatcgagggtgcgcgcatgcgaatgcg
gaggcaagcatgccaggttccagccggtgtgtgtagatgtgaccgaagatctcagaccggatcatttggttatt
gcccgcactggagcagagttcggatccagtggagaagaaactgactaaggtgagtattgggaaaactttggggt
gggattttcagatggacagattgagtaaaaatttgttttttctgtcttgcagctgacatgagtggaaatgcttc
ttttaaggggggagtcttcagcccttatctgacagggcgtctcccatcctgggcaggagttcgtcagaatgtta
tgggatctactgtggatggaagacccgttcaacccgccaattcttcaacgctgacctatgctactttaagttct
teacctttggaegeagetgcageegetgcegeegcctctgtcgcegetaacactgtgettggaatgggttacta
tggaagcatcgtggctaattccacttcctctaataacccttctacactgactcaggacaagttacttgtccttt
tggcccagetggaggctttgacccaacgtctgggtgaactttctcageaggtggccgagttgcgagtacaaact
gagtctgctgtcggcacggcaaagtctaaataaaaaaaattccagaatcaatgaataaataaacgagcttgttg
ttgatttaaaatcaagtgtttttatttcatttttcgcgcacggtatgccctggaccaccgatctcgatcattga
gaactcggtggattttttccagaatcctatagaggtgggattgaatgtttagatacatgggcattaggccgtct
ttggggtggagatagetecattgaagggatteatgetccggggtagtgttgtaaatcacccagtcataacaagg
tcgcagtgcatggtgttgcacaatatcttttagaagtaggctgattgccacagataagcccttggtgtaggtgt
ttacaaaccggttgagctgggaggggtgcattcgaggtgaaattatgtgcattttggattggatttttaagttg
gcaatattgccgccaagatcccgtcttgggttcatgttatgaaggactaccaagacggtgtatccggtacattt
aggaaatttatcgtgcagcttggatggaaaagcgtggaaaaatttggagacacccttgtgtcctccgagatttt
ccatgcactcatccatgataatagcaatggggccgtgggcagcggcgcgggcaaacacgttccgtgggtctgac
acatcatagttatgttcctgagttaaatcatcataagccattttaatgaatttggggcggagcgtaccagattg
gggtatgaatgttccttcgggccccggagcatagttcccctcacagatttgcatttcccaagctttcagttctg
agggtggaatcatgtccacctggggggctatgaagaacaccgtttcgggggcgggggtgattagttgggatgat
agcaagtttctgagcaattgagatttgccacatccggtggggccataaataattccgattacaggttgcaggtg
gtagtttagggaacggcaactgccgtcttctcgaagcaagggggccacctcgttcatcatttcccttacatgca
tattttcccgcaccaaatccattaggaggcgctctcctcctagtgatagaagttcttgtagtgaggaaaagttt
ttcagcggttttagaccgtcagecatgggcattttggaaagagtttgetgcaaaagttctagtctgttccacag
ttcagtgatgtgttctatggcatctcgatccagcagacctcctcgtttcgcgggtttggacggctcctggagta
gggtatgagacgatgggcgtccagegetgccagggttcggtccttccagggtctcagtgttcgagtcagggttg
tttccgtcacagtgaaggggtgtgcgcctgcttgggcgcttgccagggtgcgcttcagactcattctgctggtg
gagaacttctgtcgcttggcgccctgtatgtcggccaagtagcagtttaccatgagttcgtagttgagcgcctc
ggctgcgtggcctttggcgcggagcttacctttggaagttttcttgcataccgggcagtataggcatttcagcg
catacagcttgggcgcaaggaaaatggattctggggagtatgcatccgcgccgcaggaggcgcaaacagtttca
cattccaccagccaggttaaatccggttcattggggtcaaaaacaagttttccgccatattttttgatgcgttt
cttacctttggtctccataagttcgtgtcctcgttgagtgacaaacaggctgtccgtatctccgtagactgatt
ttacaggcctcttctccagtggagtgcctcggtcttcttcgtacaggaactctgaccactctgatacaaaggcg
cgcgtccaggccagcacaaaggaggctatgtgggaggggtagcgatcgttgtcaaccagggggtccaccttttc
caaagtatgcaaacacatgtcaccctcttcaacatccaggaatgtgattggcttgtaggtgtatttcacgtgac
ctggggtcccegetgggggggtataaaagggggcggttctttgetcttcctcactgtcttccggategetgtcc
aggaacgtcagctgttggggtaggtattccctctcgaaggcgggcatgacctctgcactcaggttgtcagtttc
taagaacgaggaggatttgatattgacagtgccggttgagatgcctttcatgaggttttcgtccatttggtcag
aaaacacaatttttttattgtcaagtttggtggcaaatgatccatacagggcgttggataaaagtttggcaatg
gatcgcatggtttggttcttttccttgtccgcgcgctctttggcggcgatgttgagttggacatactcgcgtgc
caggcacttccattcggggaagatagttgttaattcatctggcacgattctcacttgccaccctcgattatgca
aggtaattaaatccacactggtggccacctcgcctcgaaggggttcattggtccaacagagcctacctcctttc
ctagaacagaaagggggaagtgggtctagcataagttcatcgggagggtctgcatccatggtaaagattccegg
aagtaaatccttatcaaaatagctgatgggagtggggtcatctaaggccatttgccattctcgagctgccagtg
egegetcatatgggttaaggggactgccccagggcatgggatgggtgagagcagaggcatacatgccacagatg
tcatagacgtagatgggatcctcaaagatgcctatgtaggttggatagcatcgcccccctctgatacttgctcg
cacatagtcatatagttcatgtgatggcgctagcagccccggacccaagttggtgcgattgggtttttctgttc
tgtagacgatctggcgaaagatggcgtgagaattggaagagatggtgggtctttgaaaaatgttgaaatgggca
tgaggtagacctacagagtctctgacaaagtgggcataagattcttgaagcttggttaccagttcggcggtgac
aagtacgtctagggcgcagtagtcaagtgtttcttgaatgatgtcataacctggttggtttttcttttcccaca
gttcgcggttgagaaggtattcttcgcgatccttccagtactcttctagcggaaacccgtctttgtctgcacgg
taagatcctagcatgtagaactgattaactgccttgtaagggcagcagcccttctctacgggtagagagtatgc
ttgagcagcttttcgtagcgaagcgtgagtaagggcaaaggtgtctctgaccatgactttgagaaattggtatt
tgaagtccatgtcgtcacaggctccctgttcccagagttggaagtctacccgtttcttgtaggcggggttgggc
aaagcgaaagtaacatcattgaagagaatcttaccggctctgggcataaaattgcgagtgatgcggaaaggctg
tggtacttccgctcgattgttgatcacctgggcagctaggacgatttcgtcgaaaccgttgatgttgtgtccta
cgatgtataattctatgaaacgcggcgtgcctctgacgtgaggtagcttactgagctcatcaaaggttaggtct
gtggggtcagataaggcgtagtgttegagageecattcgtgcaggtgaggatttgcatgtaggaatgatgacca
aagatctaccgccagtgctgtttgtaactggtcccgatactgacgaaaatgccggccaattgccattttttctg
gagtgacacagtagaaggttctggggtcttgttgccatcgatcccacttgagtttaatggctagatcgtgggcc
atgttgacgagacgctcttctcctgagagtttcatgaccagcatgaaaggaactagttgtttgccaaaggatcc
catccaggtgtaagtttccacatcgtaggtcaggaagagtctttctgtgcgaggatgagagccgatcgggaaga
actggatttcctgccaccagttggaggattggctgttgatgtgatggaagtagaagtttctgcggcgcgccgag
cattcgtgtttgtgcttgtacagacggccgcagtagtcgcagcgttgcacgggttgtatctcgtgaatgagctg
tacctggcttcccttgacgagaaatttcagtgggaagccgaggcctggcgattgtatctcgtgctcttctatat
tcgctgtatcggcctgttcatcttctgtttcgatggtggtcatgctgacgagcccccgcgggaggcaagtccag
acctcggcgcgggaggggcggagctgaaggacgagagcgcgcaggctggagctgtccagagtcctgagacgctg
cggactcaggttagtaggtagggacagaagattaacttgcatgatcttttccagggcgtgcgggaggttcagat
ggtacttgatttccacaggttcgtttgtagagacgtcaatggcttgcagggttccgtgtcctttgggcgccact
accgtacctttgttttttcttttgatcggtggtggctctcttgcttcttgcatgctcagaagcggtgacgggga
cgcgcgccgggcggcagcggttgttccggacccgggggcatggctggtagtggcacgtcggcgccgcgcacggg
caggttctggtattgcgctctgagaagacttgcgtgcgccaccacgcgtcgattgacgtcttgtatctgacgtc
tctgggtgaaagctaccggccccgtgagcttgaacctgaaagagagttcaacagaatcaatttcggtatcgtta
acggcagcttgtctcagtatttcttgtacgtcaccagagttgtcctggtaggcgatctccgccatgaactgctc
gatttcttcctcctgaagatctccgcgacccgctctttcgacggtggccgcgaggtcattggagatacggccca
tgagttgggagaatgcattcatgcccgcctcgttccagacgcggctgtaaaccacggccccctcggagtctctt
gcgcgcatcaccacctgagcgaggttaagctccacgtgtctggttaagaccgcatagttgcataggcgctgaaa
aaggtagttgagtgtggtggcaatgtgttcggcgacgaagaaatacatgatccatcgtctcagcggcatttcgc
taacatcgcccagagcttccaagcgctccatggcctcgtagaagtccacggcaaaattaaaaaactgggagttt
cgcgcggacacggtcaattcctcctcgagaagacggatgagttcggctatggtggcccgtacttcgcgttcgaa
ggctcccgggatctcttcttcctcttctatctcttcttccactaacatctcttcttcgtcttcaggcgggggcg
gagggggcacgcggcgacgtcgacggcgcacgggcaaacggtcgatgaatcgttcaatgacctctccgcggcgg
cggcgcatggtttcagtgacggcgcggccgttctcgcgcggtcgcagagtaaaaacaccgccgcgcatctcctt
aaagtggtgactgggaggttctccgtttgggagggagagggcgctgattatacattttattaattggcccgtag
ggactgcgcgcagagatctgatcgtgtcaagatccacgggatctgaaaacctttcgacgaaagcgtctaaccag
tcacagtcacaaggtaggctgagtacggcttcttgtgggcgggggtggttatgtgttcggtctgggtcttctgt
ttcttcttcatctcgggaaggtgagacgatgctgctggtgatgaaattaaagtaggcagttctaagacggcgga
tggtggcgaggagcaccaggtctttgggtccggcttgctggatacgcaggcgattggccattccccaagcatta
tcctgacatctagcaagatctttgtagtagtcttgcatgagccgttctacgggcacttcttcctcacccgttct
gccatgcatacgtgtgagtccaaatccgcgcattggttgtaccagtgccaagtcagctacgactctttcggcga
ggatggcttgctgtacttgggtaagggtggcttgaaagtcatcaaaatccacaaagcggtggtaagcccctgta
ttaatggtgtaagcacagttggccatgactgaccagttaactgtctggtgaccagggcgcacgagctcggtgta
tttaaggcgcgaataggcgcgggtgtcaaagatgtaatcgttgcaggtgcgcaccagatactggtaccctataa
gaaaatgcggcggtggttggcggtagagaggccatcgttctgtagctggagcgccaggggcgaggtcttccaac
ataaggcggtgatagccgtagatgtacctggacatccaggtgattcctgcggcggtagtagaagcccgaggaaa
ctcgcgtacgcggttccaaatgttgcgtagcggcatgaagtagttcattgtaggcacggtttgaccagtgaggc
gcgcgcagtcattgatgctctatagacacggagaaaatgaaagcgttcagcgactcgactccgtagcctggagg
aacgtgaacgggttgggtcgcggtgtaccccggttcgagacttgtactcgagccggccggagccgcggctaacg
tggtattggcactcccgtctcgacccagcctacaaaaatccaggatacggaatcgagtcgttttgctggtttcc
gaatggcagggaagtgagtcctatttttttttttttttgccgctcagaatgcatcccgtgctgcgacagatgcg
cccccaacaacagcccccctcgcagcagcagcagcagcaaccacaaaaggctgtccctgcaactactgcaactg
ccgccgtgagcggtgcgggacagcccgcctatgatctggacttggaagagggcgaaggactggcacgtctaggt
gcgccttcgcccgagcggcatccgcgagttcaactgaaaaaagattctcgcgaggcgtatgtgccccaacagaa
cctatttagagacagaagcggcgaggagccggaggagatgcgagcttcccgctttaacgcgggtcgtgagctgc
gtcacggtttggaccgaagacgagtgttgcgagacgaggatttcgaagttgatgaagtgacagggatcagtcct
gccagggcacacgtggctgcagccaaccttgtatcggcttacgagcagacagtaaaggaagagcgtaacttcca
aaagtcttttaataatcatgtgcgaaccctgattgcccgcgaagaagttacccttggtttgatgcatttgtggg
atttgatggaagctatcattcagaaccctactagcaaacctctgaccgcccagctgtttctggtggtgcaacac
agcagagacaatgaggctttcagagaggcgctgctgaacatcaccgaacccgaggggagatggttgtatgatct
tatcaacattctacagagtatcatagtgcaggagcggagcctgggcctggccgagaaggtagctgccatcaatt
actcggttttgagcttgggaaaatattacgctcgcaaaatctacaagactccatacgttcccatagacaaggag
gtgaagatagatgggttctacatgcgcatgacgctcaaggtcttgaccctgagcgatgatcttggggtgtatcg
caatgacagaatgcatcgcgcggttagcgccagcaggaggcgcgagttaagcgacagggaactgatgcacagtt
tgcaaagagctctgactggagctggaaccgagggtgagaattacttcgacatgggagctgacttgcagtggcag
cctaatcgcagggctctgagcgccgcgacggcaggatgtgagcttccttacatagaagaggcggatgaaggcga
ggaggaagagggcgagtacttggaagactgatggcacaacccgtgttttttgctagatggaacagcaagcaccg
gatcccgcaatgcgggcggcgctgcagagccagccgtccggcattaactcctcggacgattggacccaggccat
gcaacgtatcatggcgttgacgactcgcaaccccgaagcctttagacagcaaccccaggccaaccgtctatcgg
ccatcatggaagctgtagtgccttcccgatctaatcccactcatgagaaggtcctggccatcgtgaacgcgttg
gtggagaacaaagctattcgtccagatgaggccggactggtatacaacgctctcttagaacgcgtggctcgcta
caacagtagcaatgtgcaaaccaatttggaccgtatgataacagatgtacgcgaagccgtgtctcagcgcgaaa
ggttccagcgtgatgccaacctgggttcgctggtggcgttaaatgctttcttgagtactcagectgetaatgtg
ccgcgtggtcaacaggattatactaactttttaagtgctttgagactgatggtatcagaagtacctcagagcga
agtgtatcagtccggtcctgattacttctttcagactagcagacagggcttgcagacggtaaatctgagccaag
cttttaaaaaccttaaaggtttgtggggagtgcatgccccggtaggagaaagagcaaccgtgtctagcttgtta
acteegaacteeegectgttattactgttggtagetectttcaccgacageggtagcatcgaccgtaattecta
tttgggttacctactaaacctgtatcgcgaagccatagggcaaagtcaggtggacgagcagacctatcaagaaa
ttacccaagtcagtcgcgctttgggacaggaagacactggcagtttggaagccactctgaacttcttgcttacc
aatcggtctcaaaagatccctcctcaatatgctcttactgcggaggaggagaggatccttagatatgtgcagca
gagcgtgggattgtttctgatgcaagagggggcaactccgactgcagcactggacatgacagcgcgaaatatgg
agcccagcatgtatgccagtaaccgacctttcattaacaaactgctggactacttgcacagagctgccgctatg
aactctgattatttcaccaatgccatcttaaacccgcactggctgcccccacctggtttctacacgggcgaata
tgacatgcccgaccctaatgacggatttctgtgggacgacgtggacagcgatgttttttcacctctttctgatc
atcgcacgtggaaaaaggaaggcggtgatagaatgcattcttctgcatcgctgtccggggtcatgggtgctacc
gcggctgagcccgagtctgcaagtccttttcctagtctacccttttctctacacagtgtacgtagcagcgaagt
gggtagaataagtcgcccgagtttaatgggcgaagaggagtacctaaacgattccttgctcagaccggcaagag
aaaaaaatttcccaaacaatggaatagaaagtttggtggataaaatgagtagatggaagacttatgctcaggat
cacagagacgagcctgggatcatggggactacaagtagagcgagccgtagacgccagcgccatgacagacagag
gggtcttgtgtgggacgatgaggattcggccgatgatagcagcgtgttggacttgggtgggagaggaaggggca
acccgtttgctcatttgcgccctcgcttgggtggtatgttgtgaaaaaaaataaaaaagaaaaactcaccaagg
ccatggcgacgagcgtacgttcgttcttctttattatctgtgtctagtataatgaggcgagtcgtgctaggcgg
agcggtggtgtatccggagggtcctcctccttcgtacgagagcgtgatgcagcagcagcaggcgacggcggtga
tgcaatccccactggaggctccctttgtgcctccgcgatacctggcacctacggagggcagaaacagcattcgt
tactcggaactggcacctcagtacgataccaccaggttgtatctggtggacaacaagtcggcggacattgcttc
tctgaactatcagaatgaccacagcaacttcttgaccacggtggtgcagaacaatgactttacccctacggaag
ccagcacccagaccattaactttgatgaacgatcgcggtggggcggtcagctaaagaccatcatgcatactaac
atgccaaacgtgaacgagtatatgtttagtaacaagttcaaagcgcgtgtgatggtgtccagaaaacctcccga
cggtgctgcagttggggatacttatgatcacaagcaggatattttggaatatgagtggttcgagtttactttgc
cagaaggcaacttttcagttactatgactattgatttgatgaacaatgccatcatagataattacttgaaagtg
ggtagacagaatggagtgcttgaaagtgacattggtgttaagttcgacaccaggaacttcaagctgggatggga
tcccgaaaccaagttgatcatgcctggagtgtatacgtatgaagccttccatcctgacattgtcttactgcctg
gctgcggagtggattttaccgagagtcgtttgagcaaccttcttggtatcagaaaaaaacagccatttcaagag
ggttttaagattttgtatgaagatttagaaggtggtaatattccggccctcttggatgtagatgcctatgagaa
cagtaagaaagaacaaaaagccaaaatagaagctgctacagctgctgcagaagctaaggcaaacatagttgcca
gcgactctacaagggttgctaacgctggagaggtcagaggagacaattttgcgccaacacctgttccgactgca
gaatcattattggccgatgtgtctgaaggaacggacgtgaaactcactattcaacctgtagaaaaagatagtaa
gaatagaagctataatgtgttggaagacaaaatcaacacagcctatcgcagttggtatctttcgtacaattatg
gcgatcccgaaaaaggagtgcgttcctggacattgctcaccacctcagatgtcacctgcggagcagagcaggtt
tactggtcgcttccagacatgatgaaggatcctgtcactttccgctccactagacaagtcagtaactaccctgt
ggtgggtgcagagcttatgcccgtcttctcaaagagcttctacaacgaacaagctgtgtactcccagcagctcc
gccagtccacctcgcttacgcacgtcttcaaccgctttcctgagaaccagattttaatccgtccgccggcgccc
accattaccaccgtcagtgaaaacgttcctgctctcacagatcacgggaccctgccgttgcgcagcagtatccg
gggagtccaacgtgtgaccgttactgacgccagacgccgcacctgtccctacgtgtacaaggcactgggcatag
tcgcaccgcgcgtcctttcaagccgcactttctaaaaaaaaaatgtccattcttatctcgcccagtaataacac
cggttggggtctgcgcgctccaagcaagatgtacggaggcgcacgcaaacgttctacccaacatcccgtgcgtg
ttcgcggacattttcgcgctccatggggtgccctcaagggccgcactcgcgttcgaaccaccgtcgatgatgta
atcgatcaggtggttgccgacgcccgtaattatactcctactgcgcctacatctactgtggatgcagttattga
cagtgtagtggctgacgctcgcaactatgctcgacgtaagagccggcgaaggcgcattgccagacgccaccgag
ctaccactgccatgcgagccgcaagagctctgctacgaagagctagacgcgtggggcgaagagccatgcttagg
gcggccagacgtgcagcttcgggcgccagcgccggcaggtcccgcaggcaagcagccgctgtcgcagcggcgac
tattgccgacatggcccaatcgcgaagaggcaatgtatactgggtgcgtgacgctgccaccggtcaacgtgtac
ccgtgcgcacccgtccccctcgcacttagaagatactgagcagtctccgatgttgtgtcccagcggcgaggatg
tccaagcgcaaatacaaggaagaaatgctgcaggttatcgcacctgaagtctacggccaaccgttgaaggatga
aaaaaaaccccgcaaaatcaagcgggttaaaaaggacaaaaaagaagaggaagatggcgatgatgggctggcgg
agtttgtgcgcgagtttgccccacggcgacgcgtgcaatggcgtgggcgcaaagttcgacatgtgttgagacct
ggaacttcggtggtctttacacccggcgagcgttcaagcgctacttttaagcgttcctatgatgaggtgtacgg
ggatgatgatattcttgagcaggcggctgaccgattaggcgagtttgcttatggcaagcgtagtagaataactt
ccaaggatgagacagtgtcaatacccttggatcatggaaatcccacccctagtcttaaaccggtcactttgcag
caagtgttacccgtaactccgcgaacaggtgttaaacgcgaaggtgaagatttgtatcccactatgcaactgat
ggtacccaaacgccagaagttggaggacgttttggagaaagtaaaagtggatccagatattcaacctgaggtta
aagtgagacccattaagcaggtagcgcctggtctgggggtacaaactgtagacattaagattcccactgaaagt
atggaagtgcaaactgaacccgcaaagcctactgccacctccactgaagtgcaaacggatccatggatgcccat
gcctattacaactgacgccgccggtcccactcgaagatcccgacgaaagtacggtccagcaagtctgttgatgc
ccaattatgttgtacacccatctattattcctactcctggttaccgaggcactcgctactatcgcagccgaaac
agtacctcccgccgtcgccgcaagacacctgcaaatcgcagtcgtcgccgtagacgcacaagcaaaccgactcc
cggcgccctggtgcggcaagtgtaccgcaatggtagtgcggaacctttgacactgccgcgtgcgcgttaccatc
cgagtatcatcacttaatcaatgttgccgctgcctccttgcagatatggccctcacttgtcgccttcgcgttcc
catcactggttaccgaggaagaaactcgcgccgtagaagagggatgttgggacgcggaatgcgacgctacaggc
gacggcgtgctatccgcaagcaattgcggggtggttttttaccagccttaattccaattatcgctgctgcaatt
ggcgcgataccaggcatagcttccgtggcggttcaggcctcgcaacgacattgacattggaaaaaaaacgtata
aataaaaaaaaatacaatggactctgacactcctggtcctgtgactatgttttcttagagatggaagacatcaa
tttttcatccttggctccgcgacacggcacgaagccgtacatgggcacctggagcgacatcggcacgagccaac
tgaacgggggcgccttcaattggagcagtatctggagcgggcttaaaaattttggctcaaccataaaaacatac
gggaacaaagcttggaacagcagtacaggacaggcgcttagaaataaacttaaagaccagaacttccaacaaaa
agtagtcgatgggatagcttccggcatcaatggagtggtagatttggctaaccaggctgtgcagaaaaagataa
acagtcgtttggacccgccgccageaaccccaggtgaaatgcaagtggaggaagaaattcctccgccagaaaaa
cgaggcgacaagcgtccgcgtcccgatttggaagagacgctggtgacgcgcgtagatgaaccgccttcttatga
ggaagcaacgaagcttggaatgcccaccactagaccgatagccccaatggccaccggggtgatgaaaccttctc
agttgcatcgacccgtcaccttggatttgccccctccccctgctgctactgctgtacccgcttctaagcctgtc
gctgccccgaaaccagtcgccgtagccaggtcacgtcccgggggcgctcctcgtccaaatgcgcactggcaaaa
tactctgaacagcatcgtgggtctaggcgtgcaaagtgtaaaacgccgtcgctgcttttaattaaatatggagt
agcgcttaacttgcctatctgtgtatatgtgtcattacacgccgtcacagcagcagaggaaaaaaggaagaggt
cgtgcgtcgacgctgagttactttcaagatggccaccccatcgatgctgccccaatgggcatacatgcacatcg
ccggacaggatgcttcggagtacctgagtccgggtctggtgcagttcgcccgcgccacagacacctacttcaat
ctgggaaataagtttagaaatcccaccgtagcgccgacccacgatgtgaccaccgaccgtagccagcggctcat
gttgcgcttcgtgcccgttgaccgggaggacaatacatactcttacaaagtgcggtacaccctggccgtgggcg
acaacagagtgctggatatggccagcacgttctttgacattaggggcgtgttggacagaggtcccagtttcaaa
ccctattctggtacggcttacaactctctggctcctaaaggcgctccaaatgcatctcaatggattgcaaaagg
cgtaccaactgcagcagccgcaggcaatggtgaagaagaacatgaaacagaggagaaaactgctacttacactt
ttgccaatgctcctgtaaaagccgaggctcaaattacaaaagagggcttaccaataggtttggagatttcagct
gaaaacgaatctaaacccatctatgcagataaactttatcagccagaacctcaagtgggagatgaaacttggac
tgacctagacggaaaaaccgaagagtatggaggcagggctctaaagcctactactaacatgaaaccctgttacg
ggtcctatgcgaagcctactaatttaaaaggtggtcaggcaaaaccgaaaaactcggaaccgtcgagtgaaaaa
attgaatatgatattgacatggaattttttgataactcatcgcaaagaacaaacttcagtcctaaaattgtcat
gtatgcagaaaatgtaggtttggaaacgccagacactcatgtagtgtacaaacctggaacagaagacacaagtt
ccgaagctaatttgggacaacagtctatgcccaacagacccaactacattggcttcagagataactttattgga
ctcatgtactataacagtactggtaacatgggggtgctggctggtcaagcgtctcagttaaatgcagtggttga
cttgcaggacagaaacacagaactttcttaccaactcttgcttgactctctgggcgacagaaccagatacttta
gcatgtggaatcaggctgtggacagttatgatcctgatgtacgtgttattgaaaatcatggtgtggaagatgaa
cttcccaactattgttttccactggacggcataggtgttccaacaaccagttacaaatcaatagttccaaatgg
agaagataataataattggaaagaacctgaagtaaatggaacaagtgagatcggacagggtaatttgtttgcca
tggaaattaaccttcaagccaatctatggcgaagtttcctttattccaatgtggctctgtatctcccagactcg
tacaaatacaccccgtccaatgtcactcttccagaaaacaaaaacacctacgactacatgaacgggcgggtggt
gccgccatctctagtagacacctatgtgaacattggtgccaggtggtctctggatgccatggacaatgtcaacc
cattcaaccaccaccgtaacgctggcttgcgttaccgatctatgcttctgggtaacggacgttatgtgcctttc
cacatacaagtgcctcaaaaattcttcgctgttaaaaacctgctgcttctcccaggctcctacacttatgagtg
gaactttaggaaggatgtgaacatggttctacagagttccctcggtaacgacctgcgggtagatggcgccagca
tcagtttcacgagcatcaacctctatgctacttttttccccatggctcacaacaccgcttccacccttgaagcc
atgctgcggaatgacaccaatgatcagtcattcaacgactacctatctgcagctaacatgctctaccccattcc
tgccaatgcaaccaatattcccatttccattccttctcgcaactgggcggctttcagaggctggtcatttacca
gactgaaaaccaaagaaactccctctttggggtctggatttgacccctactttgtctattctggttctattccc
tacctggatggtaccttctacctgaaccacacttttaagaaggtttccatcatgtttgactcttcagtgagctg
gcctggaaatgacaggttactatctcctaacgaatttgaaataaagcgcactgtggatggcgaaggctacaacg
tagcccaatgcaacatgaccaaagactggttcttggtacagatgctcgccaactacaacatcggctatcagggc
ttctacattccagaaggatacaaagatcgcatgtattcatttttcagaaacttccagcccatgagcaggcaggt
ggttgatgaggtcaattacaaagacttcaaggccgtcgccataccctaccaacacaacaactctggctttgtgg
gttacatggctccgaccatgcgccaaggtcaaccctatcccgctaactatccctatccactcattggaacaact
gccgtaaatagtgttacgcagaaaaagttcttgtgtgacagaaccatgtggcgcataccgttctcgagcaactt
catgtctatgggggcccttacagacttgggacagaatatgctctatgccaactcagctcatgctctggacatga
cctttgaggtggatcccatggatgagcccaccctgctttatcttctcttcgaagttttcgacgtggtcagagtg
catcagccacaccgcggcatcatcgaggcagtctacctgcgtacaccgttctcggccggtaacgctaccacgta
agaagcttcttgettcttgcaaatagcagctgcaaccatggcctgcggatcccaaaacggctccagegageaag
agctcagagccattgtccaagacctgggttgcggaccctattttttgggaacctacgataagcgcttcccgggg
ttcatggcccccgataagctcgcctgtgccattgtaaatacggccggacgtgagacggggggagagcactggtt
ggctttcggttggaacccacgttctaacacctgctacctttttgatccttttggattctcggatgatcgtctca
aacagatttaccagtttgaatatgagggtctcctgcgccgcagcgctcttgctaccaaggaccgctgtattacg
ctggaaaaatctacccagaccgtgcagggcccccgttctgccgcctgcggacttttctgctgcatgttccttca
cgcctttgtgcactggcctgaccgtcccatggacggaaaccccaccatgaaattgctaactggagtgccaaaca
acatgcttcattctcctaaagtccagcccaccctgtgtgacaatcaaaaagcactctaccattttcttaatacc
cattcgccttattttcgctctcatcgtacacacatcgaaagggccactgcgttcgaccgtatggatgttcaata
atgactcatgtaaacaacgtgttcaataaacatcactttatttttttacatgtatcaaggctctggattactta
tttatttacaagtcgaatgggttctgacgagaatcagaatgacccgcaggcagtgatacgttgcggaactgata
cttgggttgccacttgaattcgggaatcaccaacttgggaaccggtatatcgggcaggatgtcactccacagct
ttctggtcagctgcaaagctccaagcaggtcaggagccgaaatcttgaaatcacaattaggaccagtgctctga
gcgcgagagttgcggtacaccggattgcagcactgaaacaccatcagegacggatgtctcacgcttgccagcac
ggtgggatctgcaatcatgcccacatccagatcttcagcattggcaatgctgaacggggtcatcttgcaggtct
gcctacccatggcgggcacccaattaggcttgtggttgcaatcgcagtgcagggggatcagtatcatcttggcc
tgatcctgtctgattcctggatacacggctctcatgaaagcatcatattgcttgaaagcctgctgggctttact
accctcgggataaaacatcccgcaggacctgctcgaaaactggttagcctgcacagccggcatcattcacacag
cagcgggcgtcattgttggctatttgcaccacacttctgccccagcggttttgggtgattttggttegeteggg
attctcctttaaggctcgttgtccgttctcgctggccacatccatctcgataatctgctccttctgaatcataa
tattgccatgcaggcacttcagcttgccctcataatcattgcagccatgaggccacaacgcacagcctgtacat
tcccaattatggtgggcgatctgagaaaaagaatgtatcattccctgcagaaatcttcccatcatcgtgctcag
tgtcttgtgactagtgaaagttaactggatgcctcggtgctcttcgtttacgtactggtgacagatgcgcttgt
attgttegtgttgctcaggcattagtttaaaacaggttctaagttegttatecageetgtacttetccatcage
agacacatcacttccatgcctttctcccaagcagacaccaggggcaagctaatcggattcttaacagtgcaggc
agcagctcctttagccagagggtcatctttagcgatcttctcaatgcttcttttgccatccttctcaacgatgc
gcacgggcgggtagctgaaacccactgetacaagttgcgcctcttctctttcttcttegetgtcttgactgatg
tcttgcatggggatatgtttggtcttccttggcttctttttggggggtatcggaggaggaggactgtcgctccg
ttccggagacagggaggattgtgacgtttcgctcaccattaccaactgactgtcggtagaagaacctgacccca
cacggcgacaggtgtttttcttcgggggcagaggtggaggcgattgcgaagggctgcggtccgacctggaaggc
ggatgactggcagaaccccttccgcgttcgggggtgtgetccctgtggcggtegettaactgatttccttcgcg
getggecattgtgttctcctaggcagagaaacaacagacatggaaactcagecattgetgtcaacatcgccacg
agtgccatcacatctcgtcctcagcgacgaggaaaaggagcagagcttaagcattccaccgcccagtcctgcca
ccacctctaccctagaagataaggaggtcgacgcatctcatgacatgcagaataaaaaagcgaaagagtctgag
acagacatcgagcaagacccgggctatgtgacaccggtggaacacgaggaagagttgaaacgctttctagagag
agaggatgaaaactgcccaaaacagcgagcagataactatcaccaagatgctggaaatagggatcagaacaccg
actacctcatagggcttgacggggaagacgcgctccttaaacatctagcaagacagtegetcatagtcaaggat
gcattattggacagaactgaagtgcccatcagtgtggaagagctcagctgcgcctacgagcttaaccttttttc
acctegtactccccccaaacgtcagccaaacggcacctgcgagccaaatcctegettaaacttttatccagctt
ttgctgtgccagaagtactggctacctatcacatcttttttaaaaatcaaaaaattccagtctcctgccgcgct
aatcgcacccgcgccgatgccctactcaatctgggacctggttcacgcttacctgatatagcttccttggaaga
ggttccaaagatcttcgagggtctgggcaataatgagactcgggccgcaaatgctctgcaaaagggagaaaatg
gcatggatgagcatcacagcgttctggtggaattggaaggcgataatgccagactcgcagtactcaagcgaagc
gtcgaggtcacacacttcgcatatcccgctgtcaacctgccccctaaagtcatgacggcggtcatggaccagtt
actcattaagcgcgcaagtcccctttcagaagacatgcatgacccagatgcetgtgatgagggtaaaccagtgg
tcagtgatgagcagctaacccgatggctgggcaccgactctccccgggatttggaagagcgtcgcaagcttatg
atggccgtggtgctggttaccgtagaactagagtgtctccgacgtttctttaccgattcagaaaccttgcgcaa
actcgaagagaatctgcactacacttttagacacggctttgtgcggcaggcatgcaagatatctaacgtggaac
tcaccaacctggtttcctacatgggtattctgcatgagaatcgcctaggacaaagcgtgctgcacagcaccctt
aagggggaagceegeegtgattacatccgcgattgtgtctatctctacctgtgccacacgtggcaaaceggcat
gggtgtatggcagcaatgtttagaagaacagaacttgaaagagcttgacaagctcttacagaaatctcttaagg
ttctgtggacagggttcgacgagcgcaccgtcgcttccgacctggcagacctcatcttcccagagcgtctcagg
gttactttgcgaaacggattgcctgactttatgagccagagcatgcttaacaattttcgctctttcatcctgga
acgctccggtatcctgcccgccacctgctgcgcactgccctccgactttgtgcctctcacctaccgcgagtgcc
ccccgcegetatggagtcactgetacctgttccgtctggccaactatctctcctaccactcggatgtgategag
gatgtgageggagaeggettgetggagtgccactgccgctgcaatctgtgcacgccccaccggtccctagcttg
caacccccagttgatgagcgaaacccagataataggcacctttgaattgcaaggccccagcagccaaggcgatg
ggtcttctcctgggcaaagtttaaaactgaccccgggactgtggacctccgcctacttgcgcaagtttgctccg
gaagattaccacccctatgaaatcaagttctatgaggaccaatcacagcctccaaaggccgaactttcggcttg
cgtcatcacccagggggcaattctggcccaattgcaagccatccaaaaatcccgccaagaatttctactgaaaa
agggtaagggggtctaccttgacccccagaccggcgaggaactcaacacaaggttccctcaggatgtcccaacg
acgagaaaacaagaagttgaaggtgcagccgccgcccccagaagatatggaggaagattgggacagtcaggcag
aggaggcggaggaggacagtctggaggacagtctggaggaagacagtttggaggaggaaaacgaggaggcagag
gaggtggaagaagtaaccgccgacaaacagttatcctcggctgcggagacaagcaacagcgctaccatctccgc
tccgagtcgaggaacccggcggcgtcccagcagtagatgggacgagaccggacgcttcccgaacccaaccagcg
cttccaagaccggtaagaaggatcggcagggatacaagtcctggcgggggcataagaatgccatcatctcctgc
ttgcatgagtgcgggggcaacatatccttcacgcggcgctacttgctattccaccatggggtgaactttccgcg
caatgttttgcattactaccgtcacctccacagcccctactatagccagcaaatcccgacagtctcgacagata
aagacagcggcggcgacctccaacagaaaaccagcagcggcagttagaaaatacacaacaagtgcagcaacagg
aggattaaagattacagccaacgagccagcgcaaacccgagagttaagaaatcggatctttccaaccctgtatg
ccatcttccagcagagtcggggtcaagagcaggaactgaaaataaaaaaccgatctctgcgttcgctcaccaga
agttgtttgtatcacaagagcgaagatcaacttcagcgcactctcgaggacgccgaggctctcttcaacaagta
ctgcgcgctgactcttaaagagtaggcagcgaccgcgcttattcaaaaaaggcgggaattacatcatcctcgac
atgagtaaagaaattcccacgccttacatgtggagttatcaaccccaaatgggattggcagcaggcgcctccca
ggactactccacccgcatgaattggctcagcgccgggccttctatgatttctcgagttaatgatatacgcgcct
accgaaaccaaatacttttggaacagtcagctcttaccaccacgccccgccaacaccttaatcccagaaattgg
cccgccgccctagtgtaccaggaaagtcccgctcccaccactgtattacttcctcgagacgcccaggccgaagt
ccaaatgactaatgcaggtgcgcagttagctggcggctccaccctatgtcgtcacaggcctcggcataatataa
aacgcctgatgatcagaggccgaggtatecagetcaacgacgagtcggtgagctctccgcttggtctacgacca
gaeggaatettteagattgeeggetgcgggagatcttccttcacccctcgtcaggctgttctgactttggaaag
ttcgtcttcgcaaccccgctcgggcggaatcgggaccgttcaatttgtagaggagtttactccctctgtctact
teaaceectteteeggatetectgggcactacccggacgagttcataccgaacttcgacgcgattagegagtea
gtggacggctacgattgatgtctggtgacgcggctgagctatctcggctgcgacatctagaccactgccgccgc
tttegetgetttgcccgggaacttattgagttcatetacttcgaactccccaaggatcaccctcaaggtccggc
ccacggagtgcggattactatcgaaggcaaaatagactctcgcctgcaacgaattttctcccagcggcccgtgc
tgatcgagcgagaccagggaaacaccacggttagtaatcaattacggggtcattagttcatagcccatatatgg
agttgcgatcgctgcgggccatgtcatacaccgccttcagagcagccggacctatctgcccgttcgtgccgtcg
ttgttaatcaccacatggttattctgctcaaacgtcccggacgcctgcgaccggctgtctgccatgctgcccgg
tgtaccgacataaccgccggtggcatagecgcgcatcagecggtaaagattccccacgccaatccggctggttg
cctccttcgtgaagacaaactcaccacggtgaacaatcccegetggetcatatttgccgccggttcccgtaaat
cctccggttgcaaaatggaatttcgccgcagcggcctgaatggctgtaccgcctgacgcggatgcgccgccacc
aacagccccgccaatggcgctgccgatactcccgacaatccccaccattgcctgcttaagcagaatttctgtca
tcatggacagcacggaacgggtgaagctgcgccagttctgctcactgccggtcagcatcgccgccatattctgt
gcaataccatcaaaggtctgcgtggetgcactttttacctgcgacatactgtccgtggcgctctcttcccactc
actccagccggacttcaggcctgccatccagttcccgcgaagctggtcttcagccgcccaggtctttttctgct
ctgacatgacgttattcagcgccagcggattatcgccatactgttccttcaggcgctgttccgtggcttcccgt
tetgcctgeeggtcagtcageccccggcttttcgcatcaatggcggcccgttttgcccgttgetgetgtgegaa
tttatccgcctgctgcgccagcgcgttcaggcgctcctgatacgtaaccttgtcgccaagtgcagccagctggc
gtttgtactccagcgtctcatctttatgcgccagcagggatttctcctgtgcagacagctggcgacgttgcgcc
gcctcctccagtaccgcgaactgactctccgccttccacaaatcccggcgctgetggetgattttctcatttgc
tccggcatgcttctccagcgtccggagttctgcctgaagcgtcagcagggcagcatgagcactgtcttcctgac
gatcgcccgcagacaccttcacgctggactgtttcggctttttcagcgtcgcttcataatcctttttcgccgcc
gecatcagcgtgttgtaatccgcctgcaggattttcccgtctttcagtgccttgttcagttcttcctgacgggc
ggtatatttctccagcggcgtctgcagccgttcgtaagccttctgcgcctcttcggtatatttcagccgtgacg
cttcggtatcgctctgctgctgcgcatttttgtcctgttgagtctgctgctcagccttctttcgggcggcttca
agcgcaagacgggccttttcacgatcatcccagtaacgcgcccgcgcttcatcgttaacaaaataatcatcctt
gcgcagattccagatgtcgtctgctttcttatacgcagcctctgccttaatcagcatctcctgcgcggtatcag
gacgaccaatatccagcaccgcatcccacatggatttgaatgcccgcgcagtcctgtctgcccaggtctccagc
gtgcccatgttctctttcaggcggcgggtctggtcatcaaaccctttcgttgcggcctcgttcgccgcctgcaa
tgccccggcttcatcgccggaacgctgcaactgagcaacatacgcaatctgctccgccgacacgttatggaact
ggcgagccatcgccgtcagccccgacgtcgggtctgtggtcagcttcccgaaggcttcagcgaccttgtccacc
tccacgccggatgcagaggagaaacgcgccacactctggctgatggacgcaatctgagectcaccgcttacccc
cgccttaaccagtgcgctgagtgactcgctggtctggttaaacgtcagccctgccgcctgcccggctctggaca
ggaccagcatacgatctgccgtcagtcccgcctgattgccggaaaggaccagcgttttgttgaaatcggacagg
gttgagttgccctgataccaggcatacgccagcgcaccggtcgccaccgccagcgaggtggcccccaccatcgg
cagggtgatcgcaccggcaagccccctgaacatggggatcatcccgccgaaggagtccttcacctgccccccct
gttgcagcaggatcagccacggactttgcccgcctgcaagctgcgtggccacgtcggtgaactgtgcaggcagc
atacgcatggcggctttatactgcccgacggaaatccccgctttctgtgcagccagcgcctgtcggctcagcga
ctgttcaacgactgccgctgtttttttcgcatcactttccgtaccagaaaaatgacgcctgactctggccatct
gctcgtcaaatctggccgcatccagactcaaatcaacgacgtcgactaagctctagcatttgtgaaccatcacc
ctaatcaagttttttggggtcgaggtgccgtaaagcactaaatcggaaccctaaagggagcccccgatttagag
cttgacggggaaagccggcgaacgtggcgagaaaggaagggaagaaagcgaaaggagcgggcgctagggcgctg
gcaagtgtagcggtcacgctgcgcgtaaccaccacacccgccgcgcttaatgcgccgctacagggcgcgtgggg
ataccccctagagccccagctggttctttccgcctcagaagccatagagcccaccgcatccccagcatgcctgc
tattgtcttcccaatcctcccccttgctgtcctgccccaccccaccccccagaatagaatgacacctactcaga
caatgcgatgcaatttcctcattttattaggaaaggacagtgggagtggcaccttccagggtcaaggaaggcac
gggggaggggcaaacaacagatggctggcaactagaaggcacagtcgaggctgatcagcgggtttgctagctta
ggcgaaggcgatgggggtcttgaaggcgtgctggtactccacgatgcccagctcggtgttgctgtgcagctcct
ccacgcggcggaaggcgaacatggggcccccgttctgcaggatgctggggtggatggcgctcttgaagtgcatg
tggctgtccaccacgaagctgtagtagccgccgtcgcgcaggctgaaggtgcgggcgaagctgcccaccagcac
gttatcgcccatggggtgcaggtgctccacggtggcgttgctgcggatgatcttgtcggtgaagatcacgctgt
cctcggggaagccggtgcccaccaccttgaagtcgccgatcacgcggccggcctcgtagcggtagctgaagctc
acgtgcagcacgccgccgtcctcgtacttctcgatgcgggtgttggtgtagccgccgttgttgatggcgtgcag
gaaggggttctcgtagccgctggggtaggtgccgaagtggtagaagccgtagcccatcacgtggctcagcaggt
aggggctgaaggtcagggcgcctttggtgctcttcatcttgttggtcatgcggccctgctcgggggtgccctct
ccgccgcccaccagctcgaactccacgccgttcagggtgccggtgatgcggcactcgatcttcatggcgggcat
ggtggctagcctagccagcttgggtctccctatagtgagtcgtattaatttcgataagccagtaagcagtgggt
tctctagttagccagagagctctgcttatatagacctcccaccgtacacgcctaccgcccatttgcgtcaatgg
ggcggagttgttacgacattttggaaagtcccgttgattttggtgccaaaacaaactcccattgacgtcaatgg
ggtggagacttggaaatccccgtgagtcaaaccgctatccacgcccattgatgtactgccaaaaccgcatcacc
atggtaatagcgatgactaatacgtagatgtactgccaagtaggaaagtcccataaggtcatgtactgggcata
atgccaggcgggccatttaccgtcattgacgtcaatagggggcgtacttggcatatgatacacttgatgtactg
ccaagtgggcagtttaccgtaaatactccacccattgacgtcaatggaaagtccctattggcgttactatggga
acatacgtcattattgacgtcaatgggcgggggtcgttgggcggtcagccaggcgggccatttaccgtaagtta
tgtaacgcggaactccatatatgggctatgaactaatgaccccgtaattgattactattaataactacaataat
caatgtcaacgcgtatatctggcccgtacatcgcgaagcagcgcaaaacgcctaaccctaagcagattcttcat
gcaattaagcttcgcggtgcttcttcagtacgctacggcaaatgtcatcgacgtttttatccggaaactgctgt
ctggctttttttgatttcagaattagcctgacgggcaatgctgcgaagggcgttttcctgctgaggtgtcattg
aacaagtcccatgtcggcaagcataagcacacagaatatgaagcccgctgccagaaaaatgcattccgtggttg
tcatacctggtttctctcatctgcttctgctttcgccaccatcatttccagcttttgtgaaagggatgcggcta
acgtatgaaattcttcgtctgtttctactggtattggcacaaacctgattccaatttgagcaaggctatgtgcc
atctcgatactcgttcttaactcaacagaagatgctttgtgcatacagcccctcgtttattatttatctcctca
gccageegetgtgctttcagtggatttcggataacagaaaggccgggaaatacccagcctcgctttgtaacgga
gtagacgaaagtgattgcgcctacccggatattatcgtgaggatgcgtcatcgccattgctccccaaatacaaa
accaatttcagccagtgcctcgtccattttttcgatgaactccggcacgatctcgtcaaaactcgccatgtact
tttcatcccgctcaatcacgacataatgcaggccttcacgcttcatacgcgggtcatagttggcaaagtaccag
gcattttttcgcgtcacccacatgctgtactgcacctgggccatgtaagctgactttatggcctcgaaaccacc
gagecggaacttcatgaaatcccgggaggtaaacgggcatttcagttcaaggccgttgccgtcactgcataaac
catcgggagagcaggcggtacgcatactttcgtcgcgatagatgatcggggattcagtaacattcacgccggaa
gtgaattcaaacagggttctggcgtcgttctcgtactgttttccccaggccagtgctttagcgttaacttccgg
agccacaccggtgcaaacctcagcaagcagggtgtggaagtaggacattttcatgtcaggccacttctttccgg
agcggggttttgctatcacgttgtgaacttctgaagcggtgatgacgccgagccgtaatttgtgccacgcatca
tccccctgttcgacagctctcacatcgatcccggtacgctgcaggataatgtccggtgtcatgctgccaccttc
tgctctgcggctttctgtttcaggaatccaagagcttttactgcttcggcctgtgtcagttctgacgatgcacg
aatgtcgcggcgaaatatctgggaacagagcggcaataagtcgtcatcccatgttttatccagggcgatcagca
gagtgttaatctcctgcatggtttcatcgttaaccggagtgatgtcgcgttccggctgacgttctgcagtgtat
gcagtattttcgacaatgcgctcggcttcatccttgtcatagataccagcaaatccgaagcggccgcggaacaa
caacaattgcattcattttatgtttcaggttcagggggaggtgtggtcctgcgattccatcgagtgcacctaca
ccctgctgaagaccctatgcggcctaagagacctgctaccaatgaattaaaaaaaaatgattaataaaaaatca
cttacttgaaatcagcaataaggtctctgttgaaattttctcccagcagcacctcacttccctcttcccaactc
tggtattctaaaccccgttcagcggcatactttctccatactttaaaggggatgtcaaattttagctcctctcc
tgtacccacaatcttcatgtctttcttcccagatgaccaagagagtccggctcagtgactccttcaaccctgtc
tacccctatgaagatgaaagcacctcccaacaccccttttataacccagggtttatttccccaaatggcttcac
acaaagcccagacggagttcttactttaaaatgtttaaccccactaacaaccacaggcggatctetacagetaa
aagtgggagggggacttacagtggatgacactgatggtaccttacaagaaaacatacgtgctacagcacccatt
actaaaaataatcactctgtagaactatccattggaaatggattagaaactcaaaacaataaactatgtgccaa
attgggaaatgggttaaaatttaacaacggtgacatttgtataaaggatagtattaacaccttatggactggaa
taaaccctccacctaactgtcaaattgtggaaaacactaatacaaatgatggcaaacttactttagtattagta
aaaaatggagggcttgttaatggctacgtgtctctagttggtgtatcagacactgtgaaccaaatgttcacaca
aaagacagcaaacatccaattaagattatattttgactcttctggaaatctattaactgaggaatcagacttaa
aaattccacttaaaaataaatcttctacagcgaccagtgaaactgtagccagcagcaaagcctttatgccaagt
actacagcttatcccttcaacaccactactagggatagtgaaaactacattcatggaatatgttactacatgac
tagttatgatagaagtctatttcccttgaacatttctataatgctaaacagccgtatgatttcttccaatgttg
cctatgccatacaatttgaatggaatctaaatgcaagtgaatctccagaaagcaacatagctacgctgaccaca
tccccctttttcttttcttacattacagaagacgacaactaaaataaagtttaagtgtttttatttaaaatcac
aaaattcgagtagttattttgcctccaccttcccatttgacagaatacacagtcctttctccccggctggcctt
aaaaagcatcatatcatgggtaacagacatattcttaggtgttatattccacacggtttcctgtcgagccaaac
getcatcagtgatattaataaactccccgggcagctcacttaagttcatgtegetgteeagetgetgagccaca
ggctgctgtccaacttgcggttgcttaacgggcggcgaaggagaagtccacgcctacatgggggtagagtcata
atcgtgcatcaggatagggcggtggtgctgcagcagcgcgcgaataaactgctgccgccgccgctccgtcctgc
aggaatacaacatggcagtggtctcctcagcgatgattcgcaccgcccgcagcataaggcgccttgtcctccgg
gcacagcagcgcaccctgatctcacttaaatcagcacagtaactgcagcacagcaccacaatattgttcaaaat
cccacagtgcaaggcgctgtatccaaagctcatggcggggaccacagaacccacgtggccatcataccacaagc
gcaggtagattaagtggcgacccctcataaacacgctggacataaacattacctcttttggcatgttgtaattc
accacctcccggtaccatataaacctctgattaaacatggcgccatccaccaccatcctaaaccagctggccaa
aacctgcccgccggctatacactgcagggaaccgggactggaacaatgacagtggagagcccaggactcgtaac
catggatcatcatgctcgtcatgatgtcaatgttggcacaacacaggcacacgtgcatacacttcctcaggatt
acaagctcctcccgcgttagaaccatatcccagggaacaacccattcctgaatcagcgtaaatcccacactgca
gggaagacctcgcacgtaactcacgttgtgcattgtcaaagtgttacattcgggcagcagcggatgatcctcca
gtatggtagcgcgggtttctgtctcaaaaggaggtagacgatccctactgtacggagtgcgccgagacaaccga
gatcgtgttggtcgtagtgtcatgccaaatggaacgccggacgtagtcattctcgtattttgtatagcaaaacg
cggccctggcagaacacactcttcttcgccttctatcctgccgcttagcgtgttccgtgtgatagttcaagtac
agccacactcttaagttggtcaaaagaatgctggcttcagttgtaatcaaaactccatcgcatctaattgttct
gaggaaatcatccacggtagcatatgcaaatcccaaccaagcaatgcaactggattgcgtttcaagcaggagag
gagagggaagagacggaagaaccatgttaatttttattccaaacgatctcgcagtacttcaaattgtagatcgc
gcagatggcatctctcgcccccactgtgttggtgaaaaagcacagctaaatcaaaagaaatgcgattttcaagg
tgctcaacggtggcttccaacaaagcctccacgcgcacatccaagaacaaaagaataccaaaagaaggagcatt
ttctaactcctcaatcatcatattacattcctgcaccattcccagataattttcagctttccagccttgaatta
ttcgtgtcagttcttgtggtaaatccaatccacacattacaaacaggtcccggagggcgccctccaccaccatt
cttaaacacaccctcataatgacaaaatatcttgctcctgtgtcacctgtagcgaattgagaatggcaacatca
attgacatgcccttggctctaagttcttctttaagttctagttgtaaaaactctctcatattatcaccaaactg
cttagccagaagccccccgggaacaagagcaggggacgctacagtgcagtacaagcgcagacctccccaattgg
ctccagcaaaaacaagattggaataagcatattgggaaccaccagtaatatcatcgaagttgctggaaatataa
tcaggcagagtttcttgtagaaattgaataaaagaaaaatttgccaaaaaaacattcaaaacctctgggatgca
aatgcaataggttaccgcgctgcgctccaacattgttagttttgaattagtctgcaaaaataaaaaaaaaacaa
gcgtcatatcatagtagcctgacgaacaggtggataaatcagtctttccatcacaagacaagccacagggtctc
cagctcgaccctcgtaaaacctgtcatcgtgattaaacaacagcaccgaaagttcctcgcggtgaccagcatga
ataagtcttgatgaagcatacaatccagacatgttagcatcagttaaggagaaaaaacagccaacatagccttt
gggtataattatgcttaatcgtaagtatagcaaagccacccctcgcggatacaaagtaaaaggcacaggagaat
aaaaaatataattatttctctgctgctgtttaggcaacgtcgcccccggtccctctaaatacacatacaaagcc
tcatcagccatggcttaccagagaaagtacagcgggcacacaaaccacaagctctaaagtcactctccaacctc
tccacaatatatatacacaagccctaaactgacgtaatgggactaaagtgtaaaaaatcccgccaaacccaaca
cacaccccgaaactgcgtcaccagggaaaagtacagtttcacttccgcaatcccaacaagcgtcacttcctctt
tctcacggtacgtcacatcccattaacttacaacgtcattttcccacggccgcgccgccccttttaaccgttaa
ccccacagccaatcaccacacggcccacactttttaaaatcacctcatttacatattggcaccattccatctat
aaggtatattattgatgatgtt (SEQ ID NO: 180)
Mutated packaging signal sequence:
CATCATCAATAATATACCTTATAGATGGAATGGTGCCAATATGTAAATGAGGTGATTTTAAAAAGTGTGGGCCG
TGTGGTGATTGGCTGTGGGGTTAACGGTTAAAAGGGGCGGCGCGGCCGTGGGAAAATGACGTTATTTAAATATA
ACTTCGTATAGCATACATTATACGAAGTTATGAGGTAGTTTTGTTCAGGGGCAAGTGAAAATTGACCCATTACG
CGCGAAAACTGAATGAGGAAGTGTTTTTCTGAATAATGTGGTATTTATGGCAGGGTGGAGTATTTGACCGGATC
CAGGTAGACTTTGCTGATTTTCGTGGAGGTTTATAACTTCGTATAGCATACATTATACGAAGTTATATTTAAAT
(SEQ ID NO: 181)
Ad35 ITR 1-137bp:
CATCATCAATAATATACCTTATAGATGGAATGGTGCCAATATGTAAATGAGGTGATTTTAAAAAGTGTGGGCCG
TGTGGTGATTGGCTGTGGGGTTAACGGTTAAAAGGGGCGGCGCGGCCGTGGGAAAATGACGTT (SEQ ID
NO: 182)
XTEN linker: SGSETPGTSESATPES (SEQ ID NO: 183)
Loxp site: ATAACTTCGTATAGCATACATTATACGAAGTTAT (SEQ ID NO: 184)
Mutated packaging signal:
GAGGTAGTTTTGTTCAGGGGCAAGTGAAAATTGACCCATTACGCGCGAAAACTGAATGAGGAAGTGTTTTTCTG
AATAATGTGGTATTTATGGCAGGGTGGAGTATTTGACCGGATCCAGGTAGACTTTGCTGATTTTCGTGGAGGTT
T (SEQ ID NO: 185)
Vector from FIG. 29
Catcatcaataatataccttattttggattgaagccaatatgataatgagggggtggagtttgtgacgtggcgc
ggggcgtgggaacggggcgggtgacgtagtagtgtggcggaagtgtgatgttgcaagtgtggcggaacacatgt
aagcgacggatgtggcaaaagtgacgtttttggtgtgcgccggtgtacagccctaggataacttcgtatagcat
acattatacgaagttatactagtacgcccgggcgtatcgatacgatatcggtccggacaggaagtgacaatttt
cgcgcggttttaggcggatgttgtagtaaatttgggcgtaaccgagtaagatttggccattttcgcgggaaaac
tgaataagaggaagtgaaatctgaataattttgtgttactcatagcgcgtaatggatccgcgttaaccggcggc
cgcattctagacggaattcataacttcgtatagcatacattatacgaagttatgctagccgaagcttgagctcg
tcgagggatctgggcgtggttaagggtgggaaagaatatataaggtgggggtcttatgtagttttgtatctgtt
ttgcagca (SEQ ID NO: 186)
Adenovirus serotype 5
Catcatcaataatataccttattttggattgaagccaatatgataatgagggggtggagtttgtgacgtggcgc
ggggcgtgggaacggggcgggtgacgtagtagtgtggcggaagtgtgatgttgcaagtgtggcggaacacatgt
aagcgacggatgtggcaaaagtgacgtttttggtgtgcgccggtgtacacaggaagtgacaattttcgcgcggt
tttaggcggatgttgtagtaaatttgggcgtaaccgagtaagatttggccattttcgcgggaaaactgaataag
aggaagtgaaatctgaataattttgtgttactcatagcgcgtaatatttgtctagggccgcgggactttgaccg
tttacgtggagactcgcccaggtgtttttctcaggtgttttccgcgttccgggtcaaagttggcgttttattat
tatagtcagctgacgtgtagtgtatttatacccggtgagttcctcaagaggccactcttgagtgccagcgagta
gagttttctcctccgagccgctccgacaccgggactgaaaatgagacatattatctgccacggaggtgttatta
ccgaaga (SEQ ID NO: 187)
Adenovirus serotype
Catcatcaataatataccttatagatggaatggtgccaatatgtaaatgaggtgattttaaaaagtgtgggccg
tgtggtgattggctgtggggttaacggttaaaaggggcggcgcggccgtgggaaaatgacgttttatgggggtg
gagtttttttgcaagttgtcgcgggaaatgttacgcataaaaaggcttcttttctcacggaactacttagtttt
cccacggtatttaacaggaaatgaggtagttttgaccggatgcaagtgaaaattgctgattttcgcgcgaaaac
tgaatgaggaagtgtttttctgaataatgtggtatttatggcagggtggagtatttgttcagggccaggtagac
tttgacccattacgtggaggtttcgattaccgtgttttttacctgaatttccgcgtaccgtgtcaaagtcttct
gtttttacgtaggtgtcagctgatcgctagggtatttatacctcagggtttgtgtcaagaggccactcttgagt
gccagcgagaagagttttctcctctgcgccggcagtttaataataaaaaaatgagagatttgcgatttctgcct
caggaaat (SEQ ID NO: 188)
Exemplary HDAd35 donor vector (HDAd35-T4-Ef1a-mgmt)
(Ad35 5′end: 1→481; FRT (Complementary): 14126→14159; pT4 LIR:
14220→14463; EF1a: 14491→15825; mgmt: 15843→16466; pA: 16484→16705; pT4
RIR: 16735→17000; FRT (Complementary): 17107→17140; and Ad35 3′end:
28823→29230):
catcatcaataatataccttatagatggaatggtgccaatatgtaaatgaggtgattttaaaaagtgtgggccg
tgtggtgattggctgtggggttaacggttaaaaggggcggcgcggccgtgggaaaatgacgttttatgggggtg
gagtttttttgcaagttgtcgcgggaaatgttacgcataaaaaggcttcttttctcacggaactacttagtttt
cccacggtatttaacaggaaatgaggtagttttgaccggatgcaagtgaaaattgctgattttcgcgcgaaaac
tgaatgaggaagtgtttttctgaataatgtggtatttatggcagggtggagtatttgttcagggccaggtagac
tttgacccattacgtggaggtttcgattaccgtgttttttacctgaatttccgcgtaccgtgtcaaagtcttct
gtttttacgtaggtgtcagctgatcgctagggtatttaccggtattcaaggattacatgagcttagaaatgtaa
ttagcatagtgtgtggcatagtgtagataccaaataaatatgatctctccttctactcttgaaaatgcaaacac
attcttggtggtcctaaaatagcctgtaacatggtttactcagcagcatttgctattcaaggcagatctgcctt
tagtcattggctgcgctcctgaacagctgtgtgaaaggctaacttttgtaaaccaaatcaaaataaaatgcagc
aaaaatttgtcactgaaaggaaatcctcagtatatccttttatgaaatgaaagatccctcatccaaacttaact
tttttaaaagtgcgcatttggagatatagccctttcttatgaatcctaattcaattttggccataaacacacgt
tgatgttccccaccccaaagcacatagcaacaagagtaggttctatattgaaaataatgacaatttaaaaacat
gtacttatttcactgtatgtggacagtgtctatgattgcatcatgaagtgtcatataaccatgtacgtgtacat
gagagagagatagagagagaagtggtagggtggtggtggtagaggggatggcgatagtaatcatggtaatggta
gaggtgatggaggtggtaatgacggaggtaagggtggtagtgatgatggtggtggtggtaatggtggtggatgt
ggtggtggcaattgggatggtgggatggtggtagccatggtgatggtggtaatggtgttgatttaaagggtggt
ggtagtgaaggtgagggtagtggtggtggaggtggtggtgctggtagcaatagtgatggtggtgatggtgttga
tgagggtgttgggatcagggtgagttcccacagtatatttcattcttgttgtaccactctgtcaacagcaccac
tgactgggacagaggaagaaggcacactctgaatgtgttattaacagaaacctcaaaacagtctgtctccttgt
agtcattcaaaattatctttttcttacctggaaaactgaaactgaattaccgggaaaaacacaggagatttttg
tttgttaatatgctgccaataaagtaattttatgtcaaatttaactacaggaaagggcaaggcattttctaagt
tccttagatgtcatgtggctaaaaaaaacaaaaggatggacageagttagatactgtacacttagctgtttgaa
gccatatattcagaaagcagatgttgggagttggtgtttgaggactgatttcctggaggtattttatataggcc
aagttcattgttctaaactctaagggcttgacttgagggaggaaaagaggcaagaacatgtttagttttgctga
cagcatcacatgggcagccctaaggctagacaactttagggcctgaagcttattctaggaaagaagcacctaca
gagtggcactgggctcccctccactatagagatgaagtcatatgacagtaaagggcaggcagggctgcctaggg
ggcccagaactgacacttccattagaatgagcacaggccagggagagaagtggggaaccagagagaaggagctg
gaattctagtaggacaaacggtaagtgaacaacaagaacaagttaagagtgtgtgcagtattctttcaaagact
gaaaaaatagtgatgtgatagaatggcaggtggctctgagcaggccaggagaaggactgggggcagagcatccc
aggcaggagggcagcaagtgggaaggccctggggtggggcttttggactgttccagtgacgggcaggcagccag
tgtgcctgtcacacaatgcaccagggaagtagtcgtgaatttgcagagggtcttgcaggctatgggaaagggat
tggattgtattttgtttgtagggaagccatcgggggacttaagcagaggaaggattggcttcatctctttgaaa
aagttctctctggatgetgatgggaggagaaatggaaggaaaagaaacacttttaggggcaagaacttttgaga
agggtggaattgggagtgtggagttggggccagctttggcacaggaggggaagctaaacacgtggccgcatgag
ggcctgtaattctacctgaaatgggtaccatttgttagggtaaacaaatgaaccaaatgcccagtgatacagac
caagtgttggcaaacttcttctgtgatggcccaggtagtaaatgtctcaggcttcgcaggccatgtggtctctg
ttgaagctctgtgtagtagacaatatgttaatgactgggcgtgactgtgtgctaataaaagtttatttacaaaa
acageeegtgggetggatttageteacaggctgtagtttgccaacctctgacctagagcatgaactgagcatct
tcttggagggaaataagttctttccaagttgccctcctcacattgcagggggccatgtaggcccattattcaca
gaagagtgggtgggcaacctttctggagcagaaaaacgtaaagatttcttccgtagtgcaagtaaggtgaccat
ttctaaaccgtgcaagtgatccagcagtcccaaaagttgtttcacttctcattgtgcgcccgttctcaggtgct
ccgaagcttccagtcctttgtagggacatggatgaaattggaaatcatcattctcagtaaactatcgcaagaac
aaaaaaccaaacaccgcatattctcactcataggtgggaattgaacaatgagatcacatggacacgggaagggg
aacatcacattctggggactgttgtggggtggggggaggggggagggatagcattgggagatatacctaatgct
agatgacaagttagtgggtgcagcgcaccagtgtggcacatgtatacatatgtaactaacctgcacaatgtgca
catgtaccctaaaacttaaagtataataataaaagaaaaaaaaaaagagaggagagaaacatcatcccctccag
gatacccttgggccttgttcttatagtcttgtacattgttgaacaatttgcatgggetagtggattaaagcaca
ccctccaccctcaggccctcaagggtctctatgataatacagtctcaccttctaccctttccatcaccatccta
ggtgctatggccaaccttgaggctgccatgttaggtctatgcatttcccacctccaccacataactctctgaag
gccaggtagtttcctattcatcttggtaaccccaaagcctcgtgacagggctcagctggcatctgcggatgtga
atgaaccattggagaaaatggtactctgcaaataactctgttattttcccatttcctgtgtaaggcctagagac
aatgactttttaattgcaccccttcccctctgtatgacactggccttctcttgtgtccagcaatgtgggtggcc
tagatgatttctaagggacttctggccaagatgaacagcagctgcatcttactgagcatttactatgtgccata
tactcagecacagetctaggggcatagaagcaggagctctcagggtcagggcagtgagtgageaagcgageace
tatgccagccctgcctctggatggggacttgagagggtgatggaagcctgcagcactggagggaggcagacaaa
gacaggcctgtgetgagggggcceggageaagagagagggaggcaatgacagcagagacatgcetgcgccttgg
gtttgagtgcccagtggtcaaatccacttccctgtggctgatgcttgcctttctaactttggaatttaggggtt
ggagatctggtgagaaggtaggagggagatgaggaggagaagggaaaggcaggaaggaaggggagggaaaggaa
aagcaaaaggggaggaggaaggtttccaacaaattattctatatcaactgcggaaatcaaaatttgttgcccaa
atcttagaagctcatgtccctcctccccagaagtctggaatgcagcactccaggggtagcttataacccaaata
tctatctgtaaaaagagaaacattgggctttcgagctgtggattctcagtaaaagcaagaggcctcagcctaca
caggccagcccagagtttgaggaaccccaggcccacacccacagggctggcccctgggtctgcatactccctag
aaatgtgcacacttctgagcctcaactctgtcctggagtctaacagcatccctctccttcctggggcagttcca
cctccagaaacctgttaccttgggccttatgtcaaggaaactgtgggaaagagctaggcaggaatgcagatgag
gccagcatgggctcctaaaagtttagaaataggcagtgtcatgctcccaggtgcctgcataaaccagctgaaaa
atggagctcccctcaccagcactctcccttcaaacagactgtgatttgcaggtcactggtttaccaagccaggc
tacccaggcaggacccagatgccaagcccagtggtgtcctgcaagctgagcagtgctcagttcttgcaaaaaaa
ggtctgtgtgaaggcaaggcctctgcctggcttctcaccccagttgggtgtctggaacaggaaggagcccttac
tgcagaaaaaggaggagggagcaaagggagcgaacagctgcgtgctccatggggaggatccccaaagtagaaag
gcgcatacacactgcagcccttgacccagaatgctcacagctacattacagattcaggtctcctcagtgtagtg
gggctgctgatgagactgtggcatcctcaggggtcaggacacacattttccatcactcttctgatggcaaaaaa
cctctgagccaatgccaacctctgatcattaaaaaaaagtgctcacagcagtgtgtggtttaggatcatgccct
gtgtggtttggaacacgtgcacaaccacaccttgttcatcaccatcccagaaaccctgacgcaggcaaagagca
gagttattaaccctactttactgatgtggatactgaggcccagaggctcatgcaagttatcaataagtggcagg
gacagttgcctctagattaactagcccctaggatcacctgggtcttggaaggggacccataaacatgagctccc
ctctettggggccagatttgcacctgtgccgcgccttcagectgcatgaagtaggggctgetggcaaagactea
aagctgtaaatctgggttttctcttgaggcttctaagggagctgtttcgacaactcactctgttcccagctggc
tgcccctgcatagggttttaaagcagcctagctttctgccaggcttggcagtggacaacgctggtcagaacatc
ccagagagctaccagaatgaagtaagtttgcttctactctttacctgtttatgggctgtctctgccactggaat
gaaaggcactgagaacagtgcctggcctgcagaaggccctggaaatacctgagctcctaatctgggaataggag
taggaagagctttggaggcagggcacctgagtttgagatctacaacttcctgcctgtgtgacattgggaaagtc
tccatcctttctgagcctcagtctccaccctggggaagtggaaatatcaatctctgtgacacagaagcaaatga
gcgaatgtgcacaaagtaccttgcacaagagagacgctcaaacacttgcctccaggtttcaccgagaactacag
agtaagatagatttgttcccagtggaggaagcctgggaataatttgcccctagactatgaattcctggggctca
agatcgagcacagggccaggcacacagaagggaccctggaaatgtggcaggaggccagagatagacaggccctt
agagctcatacccatgccctctgacctcaagaagaaagaaacctgctcaaaatctcacaaagagcttgttccaa
ccctgaatcgagtctgaggactccttcctgagtccagcactttttctgcaagaagtatatgcctccaaagctga
tgggcgcaaatcttgaaccccgtcacataaacacaaagggaggaggtgactagagctcctcctactggatatgt
ctaaggtcaccagtctaaagaaaagggatggatagaatgaggccagtatttttgcagccatccaaatgtccaca
tacgctgttacactgagggctcctctctcccccgtcttcagccctacttgcatttagaggtgagaaagatatgg
gctgaggggttgtttttcatcgtattgtagatggaaagcacactgcccttggggccatccaaatgtggaccttg
atgtagcaccccaccttctggatggccatccttctgaaagtcactgaatttctcagactttattctctttatcc
ataaagaaggagaataataataatccccccaccctgcccaaccactgactggttgggaagctcagaagaaatac
tgggcacggcatcccattgtaatctatagagtgagtcgcttcttaatattaaatggctgaacacagaagatgtg
caaaaagtactgtgtccccttcctcctccaactgaacatttcatgccctttgcaccctcattttgtctaggagc
tgccttatgaagggaataggtacctgctccgagctggaggaatctttgccacttatggtggggtatggactgag
acagagatggcatgtgacatgcgcactgagtctcaactccatgcaggctctggagcactctcaaattggagtac
taatgccttttaaattctcacactagcaatcctttgacctactgatctagggatctagggaaagaatcgtgate
ttaacttcaaagggaaggacaaaatgttctgcctcctgttaaaactccatacactaagtgcagagactggatgc
cttattaaccttgggtagatgcccaaatgttcaaaaggtcaaactcttctgttccccagatcgccagagtcatt
aaccagtcacactattaaatgaatgaacagatgctgaaaaggtacttgcattactgagatttcttatggtgatg
gcccctgcctgatatgtattcagcattttgtagttttcaatgtgcattagagtatagtggtgatgacattggcc
tctgagtttgccacttcttatatctgtgactttggtcaaattgcttaatctctctgagtctcggtttcctggag
ataataatagcttcttcttcccagggttatcatgaggattacaggagataatgccccaaaaatgcttagtaaag
tgcctagcacctagtcaatgctgaattaaaggtggttattcttacttttcgttcatttgaactttgttctcagg
gagggcaaaggatagacaaagccccatagctagtgaggagtagctgcaagactagaacccaggtgttctgagcc
ctagtcttaggccaagaacaactgttacgtgagatgcacgttttccttcaagggagctcacaattatttccatg
taaattcaaggactgctaaaagagaactctcctctgggactgatatcattttatttcaagattgatttgaaaca
tgttttttgtttgtttgtttgttttctaggaaagaacaagagaaccagttaagctgaatgcctgaagcaaatcc
ctgttagcgatgttttcaggatgagggagagtggtgcaagaaacgtgcttccagatgcacatggtttcctggga
ctagggttcagggtgtcatccctgggtgttattaagtgtcagaaggagagcaaacaagggaaacatctgagatc
cagctaaggctacaccctggaaatgcaagcccagctcttgcaaaggacctcctttggccactcaccttccaggc
cttacaataacttgtttggactgcaggtttcttggtggactcacaggccattctgcttttatttggtcaacctc
agttcacaagcacccagatgctgagatcctcagcatgtgcagcagagtttcatattagcactgggtacctttct
gaggctacagggataccgtacagcagcacctgtcacgtccagccaaaggagtgggctctctcaatgtcatccaa
tgctgtttcaactgtgaagaagaccatctgagagagttgcttttggaggctgaggcaaatttttaaaattcttt
gttctcctcaactggggtgaattcttggtcttctaggacagcttgaagttttagaaagagtcaagccactcaga
accaacagagaactctttcagagaacaaggtgtggcatagaggaggcagagggctgatcttgatcaaatccaaa
gtgtgactctaaagcaatgaatgtgaatttttggcaaagcttacaaagggctctaaaggccatctgcaaagaga
agccaagcctgatcgatgaatcactagtgcggccggatatcgatcggcacgctgttgattttctcatagtaagg
aacagtgggccctttcagtcccacttctgtagtctgtggtactacaaatggtgagcccatgatgttgccattca
tagggttattctccagcagtaatgactggccagccactcccatagccgcggggctaggatttattgtcaatgga
gggacctgcagttctgcacaagcagtactaggatgagcacctgggcccattgcaagggtgacatcttcaaggca
aggcctcttaattttattagggtagcccccatcagecatgtctggaaactggaagtggtcttcttcttgtctcc
tcttaacagttccctgtgaatggaagagaagagaggaggagaagagaggagaggagaagggaagagaggtgaca
cacacacacacacacacacacacacacacagagagagagagagagagacagagagaaagagagagagagagaga
gaggaatttttataaaggtttggcacattaaagctaatgaacaggaaatgtgcatgataaaacagacctctcag
tttaaagacttatagttgtgaaaactataaaatacagcctgtctttggaaccatagtgcttatttattcattat
tatgtttcatctaaactgtctaattacatttcaaataaggcattatgttgtctgtatactaaaacgggatagaa
cgttattcaaagggtaatctgcccacttcaaggagagttcaacaaaactatgcagaagtcactaaatgaaccat
gctgccaaaggcaggcattggagagaaaactagaagtagctaaatagttttaattctttcctgtctacagacac
atagattttaacgaaggaataccatagtatagaattgaacttttaggctgccttctagtcttggttaaatgcat
caggctgcagtggtaaaattgaatacaacagagcccttacaggaaagaagtagatctggatgtgttttcttggg
gagctgtttaaaatactgtttttgggaaagcacaagtttcagaacagtcattgtaggcatcgtattcattgttc
catttatttttacacacacacacacacacacacacacacacactctcacacattgctatgtgtacacaaaaata
atttggaagaacctatacccaacaatttggagtggtcatttatttgggatgactggcaattccctttctattct
cttcatttctgcttgtttgtctttaacgagaacgactcataatccaaaaatttaaaaaagtataaagttatcta
aataagaaattttcctctgaagatgcatcctcaggttggggagatattaaacaatgagaaaaggccccaatctg
ggatctgaaccttgggggagctgcccatcatttatagaagcacagcctttgggaacaaagcaaagtcactagca
atgtgagacttcctactcttcatggcttcatacagtcatccatcgctgttgtgttaatgaccatgacctgtatg
ttagcaggtaaatgggaaaggaagtgggggcaaaggagtatgtgcaggaatgatcaaaataaggaaaggaagag
agggatctggaaatcacctgaatgccgataggtgaacaggtagaattcttttaaagcttcccccacccggtacc
ccccaaataacccctttccagctttggaagtttcactaggacatacagtgctcatcctctgatgtcaccttaag
tttggctcttctggtttgatgagcttgtagcccactaggagctcaaggcatgcatggggccacttgccagcacg
atgaggggcatgactgtcatggccaagtgaacatcaaagcagatccccagggctgtatgtctcaggccttggtg
cacatcagaatcacttagaaacatccacattcctgggccctcccaccacaaactgacagcttcatccagggtgt
ggcccaggcatcgggagtttttccaacagctccatggctgattctcaacagaaaaccactggcccagagcaagg
gtggaggcagcgtggcatagggctctgaccttggccttgccactgaacctctcagagccccagtttctttatgt
gtaaaatgagtgtaattatagttcttttctcatgaaggtgctctgactattaagtgaaacggggcacattgtat
gacacctaatagctcctcactaactggtacccggcattataaagggcaggtatggaagggttctgggagtccaa
tacccttcttaaagacagagaggtctctgagacccagagaggggcaggccttacccagagttgctcagccagag
ggcaacaaggcccaggtcagatgcagggcccctccaccaccactcagctgcctccagacccactgccttcgcca
tgttgttggtaggacactgcatcgcccccacagaaggggcttgccaacttgagtgagaggacttgcacacttct
ttgacttttcttttgagatgcccacaatctgaacaagggcacttcaagggacagctctgtcaccaaactcatct
gaggcctgaataccatgggtcaggcaggaatgggttggagaggtgtagagcaggcacaataagagggctgaggc
ccatgcagtcatcagtgcccactttcccaggagtctgactgggcacagcacccatagtgtccctgagctggtcc
atggagcagctcactaactgtttggcccacagcaggtgctcagtaaatggcagttgaacgaatcaatggacaaa
ggaacataaattacccaacacacagggagctcagccatttactcaatccattatggagtaacctacaaacaagc
cactgggtcccaaactgaaattgtgtctcttctacattctcccaaagaatccaataggttaaaaatagaaatgt
atgaaatagatcaatcagggatgattgcatgtggatttgacataaggatcccctgcagggagtctgagctggca
acagtcaggcccaaagtgctgtccatgatgtctcgaactgcaagacagttttaacaatggcgaagcaatgcaga
accaggcaggccaaggagggggtgggggttggggaaaggaagggagggaaggggctgtgaggggcaatggtctg
gcatccctgccacgtgagcctctgaaatttgctggcagcttctatgggctcccagagctttcacttaattgttg
gtctgccactaacctgctgggagtaaggtgcagggatggaggaggcagggcatgaccaccagacactaaaggta
ccagctggggccactggcaaagggaaggaggctgcacctctcctacatgagagcccgtatacacacaccttttc
cagcactcatcaactgcatcccaagcaaatggtccctgatcaattccaattctagaaaccaactgactactcaa
taacaaagtagatcccagcaggccgccactgctggagcggatgccacttttgctatgccaagtctgtggctgga
cagctgctggcatgtacactcactgactttcataaggatgcctaataaagggggcaggctcacctggcttttct
caggggtggggtttggggtgccgatagaggctgctgttttggcagagtggcaagctgcaagcctcttctgagct
ttcatttttcaatggacttcagtgagaattcactttgtcagaggccatgcagctccatgttttggatttcatgg
aatgagctttcaacagtgagectgaagtgccctggctgaacageaagaacaccagecaaccetaaacaaggceg
aggagaggcggctgtgtttacacggaaggctcagccttgctgtaatagcgtctgccttcaccagacatcagtga
ggcgtggaaatctattatccagttaattttgcccctagataaagacttgctttcgtgtcttctctttcacagtc
ccatgatctgttactcatctcaactgcgagaagttggctgggctttcccctgtgcccagtgccacactcgtgcc
ttcactgggtcacctgtgcctgtggctgatgccgctgaggttttgcctgcccagactgggtgtttctgactaaa
tcccacagccaccattttagatcaagggcaggagatagctcactgctccggaatgacctcccctcccagaatcc
tggtaggggcggaaggtccccaaccaagctcccagccctttctaaatgaatctccctgcttcacccatgtgctt
ttctccagtctctgcggtcttgatgacagcagggtattagtcctagctgtcccacagctcctacttctttcagg
cctctccctgtgacaatcagtagccactggcaggatttcctcagagcatatctcgatttgctttcagacaatta
gttaaaaggacactggaccccagacgtcccaactcccagccagagccctcacaggcccggcctttggtggtgag
gaagggggagggagtgagtgacagtgccctggcatcttttagaaacgaattcctttctctccatacataaatgc
ctgcagagtcccatttcagaatccggcagacaaagccaccaatgtgatccccatgaccttataaacattcatta
aaatgcatttcaaggcatgtgatggcctccccaccccctagataatgagaaaacaaaggtttctcttctgatag
agacaagttcagctctgaagtcaacattatttctggttctgtctgaacaatgacatatggcaactcttcccttt
ctatagttctagtccagaatgacaaaaaaggggaaaaatttcttagagaaggtagagattatacgaatacagtc
catgaaatgagcataaggagaataaagaatataacttatccaaagaagtctggcaggctgttataaatgcttga
ttttggacactgtagttggaggtttaacatggacaccaataaaaaggtcagcaaagggtatgcactgttcctat
tgggcaagaagataggaggtcaaaggtaaccaggaaagataaactcagggagacttattttccctccagagggc
actgggcttgtaggccctgggcaaaattgtcaaaaaggtgaaaatcgcctgtggtttatttagtctgctctttc
ttcactagtgcctcaccagttcagttcaggccaatttgctagaaggtagcgaacgatcgaccggtgaagttcct
atactttctagagaataggaacttcggaataggaacttctacctagatgcatgetcagagcggcccctagetag
cgtttaaaacctacagttgaagtcggaagtttacatacacttaagttggagtcattaaaactcgtttttcaact
actccacaaatttcttgttaacaaacaatagttttggcaagtcagttaggacatctactttgtgcatgacacaa
gtcatttttccaacaattgtttacagacagattatttcacttataattcactgtatcacaattccagtgggtca
gaagtgtacatacacgcgcttgactgtgcctttaagcttttaattaatggatcactagttgagtaattcataca
aaaggactcgcccctgccttggggaatcccagggaccgtcgttaaactcccactaacgtagaacccagagatcg
ctgcgttcccgccccctcaccegeeegetctcgtcatcactgaggtggagaagagcatgcgtgaggctccggtg
cccgtcagtgggcagagcgcacatcgcccacagtccccgagaagttggggggaggggtcggcaattgaaccggt
gcctagagaaggtggcgcggggtaaactgggaaagtgatgtcgtgtactggctccgcctttttcccgagggtgg
gggagaaccgtatataagtgcagtagtcgccgtgaacgttctttttcgcaacgggtttgccgccagaacacagg
taagtgccgtgtgtggttcccgcgggcctggcctctttacgggttatggcccttgcgtgccttgaattacttcc
acgcccctggctgcagtacgtgattcttgatcccgagcttcgggttggaagtgggtgggagagttcgaggcctt
gcgettaaggagccccttcgcctcgtgettgagttgaggcctggcctgggcgetggggccgccgcgtgcgaatc
tggtggcaccttcgcgcctgtctegetgctttcgataagtctctagccatttaaaatttttgatgacctgetgc
gacgctttttttctggcaagatagtcttgtaaatgcgggccaagatctgcacactggtatttcggtttttgggg
ccgcgggcggcgacggggcccgtgcgtcccagcgcacatgttcggcgaggcggggcctgcgagcgcggccaccg
agaatcggacgggggtagtctcaagctcgccggcctgctctggtgcctggcctcgcgccgccgtgtatcgcccc
gccctgggcggcaaggctggcccggtcggcaccagttgcgtgagcggaaagatggccgcttcccggccctgctg
cagggagctcaaaatggaggacgcggcgctcgggagagcgggcgggtgagtcacccacacaaaggaaaagggcc
tttccgtcctcageegtegettcatgtgactccacggagtaccgggcgccgtccaggcacctcgattagttetc
gagcttttggagtacgtcgtctttaggttggggggaggggttttatgcgatggagtttccccacactgagtggg
tggagactgaagttaggccagcttggcacttgatgtaattctccttggaatttgccctttttgagtttggatct
tggttcattctcaagcctcagacagtggttcaaagtttttttcttccatttcaggtgtcgtgagctagacggtc
gccaccatggacaaggattgtgaaatgaaacgcaccacactggacagccctttggggaagctggagctgtctgg
ttgtgagcagggtctgcacgaaataaagctcctgggcaaggggacgtctgcagctgatgccgtggaggtcccag
cccccgctgcggttctcggaggtccggagcccctgatgcagtgcacagcctggctgaatgcctatttccaccag
cccgaggctatcgaagagttccccgtgccagcgcttcaccatcccgttttccagcaagagtcgttcacgcgtca
ggtgttatggaagctgcttaaggttgtgaaattcggagaagtgatttcttaccagcaattggccgccctggccg
gcaaccccaaagccgcgcgagcagtgggaggcgccatgagaggcaatcctgtcaagatcctcatcccgtgccac
agagtggtctgcagcagcggagccgtgggcaactactccggagggctagccgtgaaggaatggcttctggccca
tgaaggccaccggttggggaagccaggcttgggagggagctcaggtctggcaggggcctggctcaagggagcgg
gagetacctcgggctccccgcctgetggccgaaactgaagcggcegetcttcgagcagacatgataagatacat
tgatgagtttggacaaaccacaactagaatgcagtgaaaaaaatgctttatttgtgaaatttgtgatgctattg
ctttatttgtaaccattataagctgcaataaacaagttaacaacaacaattgcattcattttatgtttcaggtt
cagggggaggtgtgggaggttttttaaagcaagtaaaacctctacaaatgtggtaaaactagtaatcgatttaa
ttaaagatctttaaacaatttaaaggcaatgctaccaaatactaagcgcgtgtatgtacacttctgacccactg
ggaatgtgatgaaagaaataaaagctgaaatgaatcattctctctactattattctgatatttcacattcttaa
aataaagtggtgatcctaactgaccttaagacagggaatctttactcggattaaatgtcaggaattgtgaaaaa
gtgagtttaaatgtatttggctaaggtgtatgtaaacttccgacttcaactgtagtttaaaacgggcccgtagt
ctagggccgccagtgtgatggagttcggcttcaggtacagcacactggcggccgttactaggtagctagagcct
tcagactctagggaagttcctatactttctagagaataggaacttcggaataggaacttcacccatggcgatcg
ctagcctctaactcctagaccgtcagaactgctgggcccttcaagacgggctgctcacacccactcatgttaag
cctggtgaggcctgtactctgttttcacaggaagaaatcctcacccagtcttccccaaacacattcccaggttg
tgtcattagtgggatagagatgattattgtggggagaagagaaacatctggatggatttggtgaggttgatcta
tagaggaagtaggtgctgcctgaggtagctgtaatagaagctaaaggtcaaaggagagggccctgtcccaatcc
agatgactccacttctgctggacccaggttcacaagcttaatctacatttcacctaaatttggctaacaagccc
aaaatcacacaggcaaagggagaagtggaggcagaaccgaggttggaggccaccagggccaccgggcagagatc
atttaagcccaaccttctcacttctccctgggctctgcctctcttaaaggaccttgtggtgtgacctcttgtag
gtccctttcacactcggggcctcagtttccccactgtaaagtgaatgggtcccagctttggtaagcttatgctt
acctgatgctttcttcctgggctgctcttgtagagaaaagataaatcttcttcctccatccacgagggctcctt
tccctgggggtgagagtaggctgaggagagccacttgcacacacccttaaagaaagtattacctgcaccagctc
agtgagaggcacagatcagactgttacttgaatcaaattatgagcctccccaaatatatctatgacatttaaat
aggggattacttgaacatagactgtgggatccggtgtggagtgcgggagactagcaaagtgaatcctgagagta
gcaggtctgcacctgttggatcgagaaaggcggcctacaattctggtcaaatgagctgtgcttattgacatatt
ctattagagagtactaccaggtcaccagtcaccagaaaggctgccagctctccaaccacctccagggaactatc
ctgaatggggccttaacaagtctaagagagggttggtttgggtcccaagccaatatttgctctgctttatgtca
gtcatatggaacccaaaccaaccctctcctatgtgcctcaccagtcggtgcagggatcccaatttcaagtttgg
ttttttatggtcaaagtccagcatagattaaatgaaggggtgtgatgatggtgttaaaagagaactccagacca
gtttaactcttggacacacatcccatctcaccatggtgcttccaaccttccagagatgatgggctcctattttc
tgatgacaaagccctccacaggattgctgcctggccatcagggagtgcctctgtaactgaggctgagatcccac
tttcagtcctccagctgtggcccatccctgctccgcccaccgggtatggcctgtcctaggctcttaggtatggc
tgcattgtgaaatgatggctacagagctggcatctcctgtagtctggttcatctagtgcactacctcatagtta
aaagaaatctgtttaagccactgagggtggctcctagtgccaactccaagaacaggaagcttcccttttttggg
aggaggggcagatggtaacatggatcgtccaggtcaatgggagcagggcaaccacagtaagtactggacaacaa
cacaaaactccatgtgtggcttccatcgagtccctctccaattggtttggtcttctccgtcccatgcagcactt
tagcaaggggcctggctgaaggctatgaattgtgtggagcctcctcattgcagtctccaaccatctgatgctgg
gaaaatgtcaccaggatgcagccatgccgtgtggccaatgaaccgagaaaacaccccttttctagaatgctcta
aagaggcagaataatccagaggtgaggaaggaaatactccaccagagacccaggcagttcctacaaaagccaga
ctttccttcacctagggagtgacaagaccagtggaaaacactctcaagcagtaacccccaaatgctctgcaagc
cagtggcgtccagataccgcacaagcgagtgggctgtctaatcccatcatcatgatgtaaatatctctaggctg
ccctgggctgtgcctgaccctgtcttcagctttccacacctccacctacagcccatgcacagaaggaccaccca
ggaatgctgcaagtgtggcacctccagggccacccagggagaaggagggcagctatgctggtggctccaggccc
atttggcgggtggtaccttcacaccacaaagcccaaactgaggccccagatttggctgatgagggcatattgga
caggggtcacttatgetcttccccattgccacctggcctctggctacctggaettggetacctgtggatoctet
cacaggtgccaccatcttggctgagtctccagatgcgaggtccctgaggcagtggcgggcttctegetaatget
gatgggattaggaatgggataggtggggagggccctggactgggccctgatgagccaagtgggtttttagaggg
gctactggtacatttcagggacaggacatctggtagagctaagctggggcaataaggagccactgctaatctga
gagctagaaacaatcagcttctgggtcattattaattagggtagtttgggctgtgtggaagtcacgtactatat
ggggtagccacagctctctctacagataatctctaagacttctgattgggactgtgtgaatgcagtagcaatat
ctcttcttactgccaggccctgccagtcctgcctccacgccctggctggccccccttatgatctgacccatgcc
aggctgccatagtatgttacttctgcattagcactccttgggacctgcctctccactgtccctcagactttaaa
gaactatacaaacccaaggggctcttcccaagagaattgatatgacttgaggtgattccatttctggaagtagt
cactccattttctgcctcactctttcagtgcttcacagagcaggttcgaacgaaggagccatccaactaaccgt
catgttcgggcaaccgaagaagggagtggcaggatttcctttggagacttctggaattagacagcagtttaatg
caagcatctaaattctctccctcccagagtctcattaaaactacagtaagagtttgtgttttgttttgttttta
aagacaaaatcccaccaggatagagagaataggagaggagataacagcatcataatttatgaaactaaaatgca
gatagaccaggattaactgactacacageaccaaggaagctgaatcacaagacagcagaggagaaaactggaaa
ggatcgtggtctatacggcagaatcttcccaagcctcaggaggaggagctctagatgttcccagatctgggagg
taaagtggaatggggggacatggtcagcgtaatggggttgggctggaagcaggttaaggagcaggcagatctct
gaatcccctctctgactctgtgtccccaggcatctgcctgtcccccaccctggaagaggtctggcttgaccctt
tgtctggtgaatttcctgetetgetttcctggtcctgetggccggatcagtggaggccactcacttcaceccac
agggatgttctgtgttgccctacacctgggaactggaggtactggaggcaggctgtggtgagcttgaaagcaaa
acacagagggcagtccaatctctttggccatatttcttctgcatatccaataccatgtccacaactctgctagt
gtcctgatggtggtgggctctacacattcccgggaagctgaaggcagataatgaccaggacaggtcaacctctc
ttcttctgaaagccttcatctactaatggcctgggactcttcccttaaatgcttagattgtgtcttccactaag
gttttttgctgttgctgttgtttgtttgtttgtttgtttgtttgtttgtttgttttgagacggaatctcactct
gtcgcccaggctggagtgtagtggcacaatctcagctcaccacaaccttcacctcctaggttgaaggggttctc
ctgcctcagcctcctgtgtagctaggattacaggcacatgccaccatgcctggctaatttttgtatttttggta
gagacaggatttcgccatgttggccaggctggtcttgaactcctgacctcaggtgatctgcctaccttggtctc
ccaaagtgctgggattacaggtgtgagccaccacacccggccaaggtttttgtttgtttgtttgtttgtttgtt
tgttttgtattgaggcagggtatcactctggtcacccaggctggagtgcagtagtgcaatcacggctcactgaa
acctccacctccctggcgggctcaggtgatcctgccacctcagcttcccaggtagctgggactacaggcttgta
ccaccactcccagctaatttttgcgtttttagtagagacagggtttccccatgttgcccaggttggtctcaaac
tctgggctcaagcgatctgcctgcctcagcctcccaaagtgctgggattacaggtgtaagccaccgtacccggc
cccgccactaaggttttgaaaatgaagcaattacaagtttaagtctattaataagtgatgaagccatgtagaaa
agcagaataattatcttggatcaggaaggtcacatgaggatctacttgggggttgtcaatattctatttcttga
cctgatcagtgttgacagcaggttttaattttttacttctttttgtttgtttgtttttgagacggagtcttgct
ctgtctcccaggctggagtgcagtggtatgatctcggctcactgcaacctccgcctcctgggttcaagctgttc
tcctgcctcagcctccccagtagctgggattacaggcaggcaccaccacgaccagctaatttttgtatttttag
tagagactgggtttcaccatcttggccaggctggtctcgaacttctgatctcgtgatccgccctccttggcctc
ccaaagtgctgggattacaggcttgagccagcgtgcccggcccattttttacttccttattaaactgtacatat
aggccttgcacacttttctgcatcaatgttatattccacaataaagggaaaaggtatatacacaacttgatacc
agtaatgtgaaacatatatttctacatagaaaaaaaaatgactgaaatactgcactccaatgtgttcacacagt
agttgtttctggattatttatatattaaatgtttatatattgtattatgccatgaggtttgtgttttctctcca
cttttctgcattttccaagtttactacaaagagcacatattactcttataatcagaaagtcataaaatatattt
aaaaagacaaaattgaaactaataaggatcaacacaaaacagatgagecatctgtggaaatccgcacagaatac
tacctaaagagattggtgacgtgcatgatctcactaggatgagcacaaagcttgccagagcctagggtctattt
ctagggttggctcttggaagccaggatagttgttatctctgggaagagggaggggcacacaaggggcttctaaa
acattctgaatgttctatttctgaacctggttggtgggtacatgactgttggttttattattatatgttttata
tactcttccgtatgtatggtgtggattccaaaaaaagatttcctttagagaaaaccagaatcacataagtagaa
aatatggtgctatgttgaaggaacaactcaagtttatataaaatcatcatcatttataggcttaaaaagttgct
ttggaattttggtctaactgacttgtcttttctgcagcaaaccacgctccttctggacgtgctccaggcagagg
ggattagggtgggttcaaggctgcaagtacctagctcagcacactctcttcaggggacttagagtttgtctggt
gttggctctctgagctcttgtcaggaatgccgacccttccgaggttcaggatttgaagcctgccttcccacccc
agatttggtccacacagacactcaagtatgtatttcaactacaaatgacctgtactttcctattactcctctct
ttcatggtaacctttctggtatccttccttccctacatttatgggagggggacatcattctctgctctcctgtc
actgaaggctccaccttctgtcttcttctgacccatctggttttcctggggccacctcctctccttaccaccct
aacgcttttgtaacttgaggagaaatgagagatcacctagtcaggtcatcattctctgtagatgaagaggccca
atggtttgctcaagaattgccaagcgagttaaagacagagagtatgagagtcagcaagacctacagaaagcatc
tatctgcactgttttgcagggacttagcctttgtgtgtggactcctggaatgccacccactaagaaacattgtc
tgacaccaactccccacttggtaggtggggacactgaaactcatggcaggaaagggccttgccccaagccaggg
cagagtgtcactcatcactctcaattttcagtccagggcaccttgttgtgactatcccaaaggcagccactttc
cctggtctgaaagacctgaagagagaagagaagagaaggatggaaggcagagtatgcggctttgattcatttcc
tggtgaaaacagatctatacgagaagcaaatttcacgaaagggaagagaagaaagtgtcccatacgttgctggc
ctgtttcaaccttgctttgattcttgctgaaaagggtaccgtgtatttctgagttcaacatgcagaccagtgtt
aggaaagccactgcacctccactttagcctccagggctgtgccctgcaaatggcctgcagccttggtgcctcgc
tctccagactgcattttggaagatgggacagaggcttatggaagcccacattagaacgggggagcagaatgggt
gagatgagggatccttgatagtgaaccagatgaaggaatggtagccaaatgccaggcctcctttgtggcttcaa
tccaaaggctctggagcccttccagggcagaacatcaggcatgtttacccccactgtcctcaacagtgacagag
gtgcaatcttgggcagctggccattttgaaagcaacctccttaatctcaactgggaaggctccctagcaggacc
cctgtgttgcacacctggaggaagctagactaaccagaagctcagcacggttccatctgggatgcccaggtctg
agacgaaaaaggtaactctcttttctgggtcctggcccagttgtgtctctctccacctcattctctgagatgcc
tgtctccccttttttgtcccatcaggaggcaagagctatcactgggccagactccaccagaagccaagccagct
tgttacccagcttctcagggagcaaagaacagccttgtttctatcttatccccactgtcccctgcccctgcccc
acctcccagecattcagcttctggcttccccagagctgcctgettctttgtggtcctccattccttgaaaagac
cttctagtcattagtgtatataaatggccacttagcccagattacagtgaggtcaacagctggggctctgagaa
ttgtcacacactggcacaggagaggaggctattcttccagagaatttggagggcactcccatccacttacaaca
aaaagcccatccactgtgcttggcagtaggtgatctgagaaccaatggaaccaggttaatcctgtggcactgtt
gagtgaggagagcagtggcgggcactggaaaatatcagagacaaggcaggagacctgaaatctaggcttagctc
ctcatatacttggcagctgtatgacctcagacaaccagtgttacctctctaagcctcagtttcctcatgcaaaa
ggagggggaataacaacagagcccactgcttgggggtgttgtgaggacaggatgaaaaaacaaacagaaatccc
tcagtacaggattcagtgcagtggacagtcttgcaaggtctggttcagccctccacccctaccctcaccagtat
aaagaactctggcctacaagtcagatgacctgagttttaatctcagctttgccattagecgtgtgaacttgaga
aagtccctttcctttttacatctattgggatgatcatgcattttttgtcctttattctgttaatatagtgtgtt
acattgattgcttttcatagactgaaccagccttgtattccagggataaatctcacttggtcatggtgtataat
cctttatacaaatgttgctgggttgagtttgctagtattttgttgaagatttttatgtcttgattcataaggaa
tattggtgtaccttccccttttatggccacagtttccctacaatgatgtagtcgaactagacaacctccaatat
ctttcagtattcatgtcctctgattctgtgaaactaagaaaattaagaaatagtgattcataggcacaaggcag
gcaaaacttagactccttgtagaataattaggaagccaaatattcagtgtgcttatttctcaaataaccttagt
ttctccagtctgccccaactccgaggcctgaatatctctagatgcttatgatggcaactaaagcctaaaagcta
attcattttaaagttcttccaaatgcatagggttttatttttccagacctgggttcagatggggaatttgacaa
acaatggaaagggggaaaaacaacaatctaaacactgagtgacaaagtaacaaagaaatagtctagetatcage
cagtcaagccagccttggctttgctatccaaagtagtcagtctaattctaccaccagtttctgttcctgtagct
gtctactgcctgccagggactctgccttcccacccacaactaccaatggaaggatgtggtgaccataccagtgg
ctgetgacatctcctgccatgggaagcataattgcctccagcagcctcccccttagatecatcatttttgttgc
acttggcctgggctgtactcccggccaatgactgaacatggtgagcatagtaatgcaggcccatttctgtgagg
agcaggactcctccagtaggtgactttggctcaaggactctctattggcctggttgaacttttcctgaactgtg
ctactgtctgagactcttcttacccaatcctctttctcgccccaattgtcacagaccacctgcattgtggtctg
agtctctccccaccttctcttgctcttccctgtttatctttcacaggcatttcccccagtacattccttgaatg
tctaacccgatacgggtgcctgacttttggcagacctaagcagacaaaaaggagtacttggttacctagctctt
ctttctaccacaaacatcgagggaaccctttttccctcacccctctgccacacccccactgccccagtgaacaa
ccacagagagagctgtggtataatattaggctggtgcaaaagtaattgcggtttttgccattacttttaatggt
aaaaaccgcaattacttttgcacctacctagtatttgtgtccccccaaattcatatgttgaaacctaacccaca
atatgatgtcattaggaggcaagaccttgaggaggtgattagatgatggggtggagctctcctgaatgagatta
gtgcccttataagaagaagcccaaggaagctaccttgactcttccatcacatgagaatgcagcaagaaggcacc
atctactaatcaggaagagagctctcaccagacactgaatctgccagtgtcttgatcttgaagttcccagcctc
cagaactatgcataatgcatttccattgtctctaagccacccagcctatggtattttgtcatagcagcctgaac
tgactaagacagtgagccacatgagaagtgccccaacccctcccttaagcacttggctcacagatcagtgggtt
catttctgcctgagttttattgttattctgtagatttcttgggctagatatatttttctgttattttccttctt
cacctcagtcatgaattggttgttttaaaaaagacaatgtaagtcatggggaaactcctgacaactctactctc
ctagggttcctgataaaaggggattcagttgagtcctctgatggtctctacctgccaaagtccagcagccctta
gcaaacatgctgctcgtttctgtagagaaggtgctggtgtcccaccatacttctctctccctcatgaagggctt
gcgacccagcaaatgggtggcttatatgggtctgtttcaaaggaagagccagctctgggaagaaaaacgatgag
cataagcataacctaccactgtgcctgggaaagcagacaacttttttgatgtgtgaatatctaatgagaatgga
atccatcaattaccttaaacttaggcacagtcttcaaattcaatatatgtgggatatacttttagtcagtttgt
agacgttatttgtaataaataatctggcttctctaaagaaattattttaagtgtttggtttggtttgatttaat
ggtaaaattatatttagtggcagagaattatagcaatggtgataaactatagagtgtcataagttcatatctta
ttctcacatttgaagctgcctgcagatgcattcaagatgcagccagaagtcaggagactcaggctgttatttgg
agctcatcattttacagccttgctggactcccactttctcaggggaaaaatgtggtgttgacccagattagctc
tccaggccctgctgagttgggcactctgtaagctggagggtcttctattgtcttcacctaagtgtcaatcaaca
acccaaatgggcatgggggaagagggagctgggccaatgcccagggtgcctggtagagagataccttgggcact
ggaaggcaccagcttcccagagagaagggggagggccatgaaaaagttggctgtagatgccagggacactggga
ctctccagctgtgtgtttgtgtcttctgaagacttatgtttcattcctttggagcatgcataatcatacactgt
gggatgtgttatatagattgcttgatagttcaccactgtaataaaatactgtgactggaatctgctcccagtct
gcctttgatagcacttgtgcaacacacatttactgagcatttacagtgatccaggacctgtgttgtgaaaacat
tgatggacaaggcagatggtggagcacgtcagtgaggatttttaacaaaggctggtaagtgctataaaggaaca
ttgtaggacactagagaacaaagaacaggagaacctgacttaggctggggtggggcgttggttagaggaggctc
cttggaggacatgaggtttaagctgtgacctgaggatgaatagatgttggccaggtgaggtaccggtatttgtc
agccttaccagtaaaaaagaaaacctattaaaaaaaaaatacacatacaaagcctcatcagecatggcttacca
gagaaagtacagcgggcacacaaaccacaagctctaaagtcactctccaacctctccacaatatatatacacaa
gccctaaactgacgtaatgggactaaagtgtaaaaaatcccgccaaacccaacacacaccccgaaactgcgtca
ccagggaaaagtacagtttcacttccgcaatcccaacaagcgtcacttcctctttctcacggtacgtcacatcc
cattaacttacaacgtcattttcccacggccgcgccgccccttttaaccgttaaccccacagccaatcaccaca
cggcccacactttttaaaatcacctcatttacatattggcaccattccatctataaggtatattattgatgatg
(SEQ ID NO: 189)
Exemplary HDAd35 donor vector (HDAd35-T4-Ef1a-mgmt-GFP)
(Ad35 5′end: 1→481; FRT (Complementary): 14126→14159; pT4 LIR:
14220→14463; Ef1a promoter: 14478→15812; mgmt: 15830→16450;2A:
16451→16522; GFP: 16523→17242; SV40pA: 17269→17390; pT4 RIR: 17501→17766;
FRT (Complementary): 17873→17906; and Ad35 3′end: 29589→29996):
catcatcaataatataccttatagatggaatggtgccaatatgtaaatgaggtgattttaaaaagtgtgggccg
tgtggtgattggctgtggggttaacggttaaaaggggcggcgcggccgtgggaaaatgacgttttatgggggtg
gagtttttttgcaagttgtcgcgggaaatgttacgcataaaaaggcttcttttctcacggaactacttagtttt
cccacggtatttaacaggaaatgaggtagttttgaccggatgcaagtgaaaattgctgattttcgcgcgaaaac
tgaatgaggaagtgtttttctgaataatgtggtatttatggcagggtggagtatttgttcagggccaggtagac
tttgacccattacgtggaggtttcgattaccgtgttttttacctgaatttccgcgtaccgtgtcaaagtcttct
gtttttacgtaggtgtcagctgatcgctagggtatttaccggtattcaaggattacatgagcttagaaatgtaa
ttagcatagtgtgtggcatagtgtagataccaaataaatatgatctctccttctactcttgaaaatgcaaacac
attcttggtggtcctaaaatagcctgtaacatggtttactcagcagcatttgctattcaaggcagatctgcctt
tagtcattggctgcgctcctgaacagctgtgtgaaaggctaacttttgtaaaccaaatcaaaataaaatgcagc
aaaaatttgtcactgaaaggaaatcctcagtatatccttttatgaaatgaaagatccctcatccaaacttaact
tttttaaaagtgcgcatttggagatatagccctttcttatgaatcctaattcaattttggccataaacacacgt
tgatgttccccaccccaaagcacatagcaacaagagtaggttctatattgaaaataatgacaatttaaaaacat
gtacttatttcactgtatgtggacagtgtctatgattgcatcatgaagtgtcatataaccatgtacgtgtacat
gagagagagatagagagagaagtggtagggtggtggtggtagaggggatggcgatagtaatcatggtaatggta
gaggtgatggaggtggtaatgacggaggtaagggtggtagtgatgatggtggtggtggtaatggtggtggatgt
ggtggtggcaattgggatggtgggatggtggtagccatggtgatggtggtaatggtgttgatttaaagggtggt
ggtagtgaaggtgagggtagtggtggtggaggtggtggtgctggtagcaatagtgatggtggtgatggtgttga
tgagggtgttgggatcagggtgagttcccacagtatatttcattcttgttgtaccactctgtcaacagcaccac
tgactgggacagaggaagaaggcacactctgaatgtgttattaacagaaacctcaaaacagtctgtctccttgt
agtcattcaaaattatctttttcttacctggaaaactgaaactgaattaccgggaaaaacacaggagatttttg
tttgttaatatgctgccaataaagtaattttatgtcaaatttaactacaggaaagggcaaggcattttctaagt
tcettagatgtcatgtggctaaaaaaaacaaaaggatggacageagttagatactgtacacttagctgtttgaa
gccatatattcagaaagcagatgttgggagttggtgtttgaggactgatttcctggaggtattttatataggcc
aagttcattgttctaaactctaagggcttgacttgagggaggaaaagaggcaagaacatgtttagttttgctga
cagcatcacatgggcagccctaaggctagacaactttagggcctgaagcttattctaggaaagaagcacctaca
gagtggcactgggctcccctccactatagagatgaagtcatatgacagtaaagggcaggcagggctgcctaggg
ggcccagaactgacacttccattagaatgagcacaggccagggagagaagtggggaaccagagagaaggagctg
gaattctagtaggacaaacggtaagtgaacaacaagaacaagttaagagtgtgtgcagtattctttcaaagact
gaaaaaatagtgatgtgatagaatggcaggtggctctgagcaggccaggagaaggactgggggcagagcatccc
aggcaggagggcagcaagtgggaaggccctggggtggggcttttggactgttccagtgacgggcaggcagccag
tgtgcctgtcacacaatgcaccagggaagtagtcgtgaatttgcagagggtcttgcaggctatgggaaagggat
tggattgtattttgtttgtagggaagccatcgggggacttaagcagaggaaggattggcttcatctctttgaaa
aagttctctctggatgetgatgggaggagaaatggaaggaaaagaaacacttttaggggcaagaacttttgaga
agggtggaattgggagtgtggagttggggccagctttggcacaggaggggaagctaaacacgtggccgcatgag
ggcctgtaattctacctgaaatgggtaccatttgttagggtaaacaaatgaaccaaatgcccagtgatacagac
caagtgttggcaaacttcttctgtgatggcccaggtagtaaatgtctcaggcttcgcaggccatgtggtctctg
ttgaagctctgtgtagtagacaatatgttaatgactgggcgtgactgtgtgctaataaaagtttatttacaaaa
acageeegtgggetggatttageteacaggctgtagtttgccaacctctgacctagagcatgaactgagcatct
tcttggagggaaataagttctttccaagttgccctcctcacattgcagggggccatgtaggcccattattcaca
gaagagtgggtgggcaacctttctggagcagaaaaacgtaaagatttcttccgtagtgcaagtaaggtgaccat
ttctaaaccgtgcaagtgatccagcagtcccaaaagttgtttcacttctcattgtgcgcccgttctcaggtgct
ccgaagcttccagtcctttgtagggacatggatgaaattggaaatcatcattctcagtaaactatcgcaagaac
aaaaaaccaaacaccgcatattctcactcataggtgggaattgaacaatgagatcacatggacacgggaagggg
aacatcacattctggggactgttgtggggtggggggaggggggagggatagcattgggagatatacctaatgct
agatgacaagttagtgggtgcagcgcaccagtgtggcacatgtatacatatgtaactaacctgcacaatgtgca
catgtaccctaaaacttaaagtataataataaaagaaaaaaaaaaagagaggagagaaacatcatcccctccag
gatacccttgggccttgttcttatagtcttgtacattgttgaacaatttgcatgggetagtggattaaagcaca
ccctccaccctcaggccctcaagggtctctatgataatacagtctcaccttctaccctttccatcaccatccta
ggtgctatggccaaccttgaggctgccatgttaggtctatgcatttcccacctccaccacataactctctgaag
gccaggtagtttcctattcatcttggtaaccccaaagcctcgtgacagggctcagctggcatctgcggatgtga
atgaaccattggagaaaatggtactctgcaaataactctgttattttcccatttcctgtgtaaggcctagagac
aatgactttttaattgcaccccttcccctctgtatgacactggccttctcttgtgtccagcaatgtgggtggcc
tagatgatttctaagggacttctggccaagatgaacagcagctgcatcttactgagcatttactatgtgccata
tactcagecacagetctaggggcatagaagcaggagctctcagggtcagggcagtgagtgageaagcgageace
tatgeeagecctgcctctggatggggacttgagagggtgatggaagcctgcagcactggagggaggcagacaaa
gacaggcctgtgetgagggggcceggageaagagagagggaggcaatgacagcagagacatgcetgcgccttgg
gtttgagtgcccagtggtcaaatccacttccctgtggctgatgcttgcctttctaactttggaatttaggggtt
ggagatctggtgagaaggtaggagggagatgaggaggagaagggaaaggcaggaaggaaggggagggaaaggaa
aagcaaaaggggaggaggaaggtttccaacaaattattctatatcaactgcggaaatcaaaatttgttgcccaa
atcttagaagctcatgtccctcctccccagaagtctggaatgcagcactccaggggtagcttataacccaaata
tetatctgtaaaaagagaaacattgggetttcgagctgtggattctcagtaaaagcaagaggcctcagcctaca
caggccagcccagagtttgaggaaccccaggcccacacccacagggctggcccctgggtctgcatactccctag
aaatgtgcacacttctgagcctcaactctgtcctggagtctaacagcatccctctccttcctggggcagttcca
cctccagaaacctgttaccttgggccttatgtcaaggaaactgtgggaaagagctaggcaggaatgcagatgag
gccagcatgggetcctaaaagtttagaaataggcagtgtcatgetcccaggtgcctgcataaaccagctgaaaa
atggagctcccctcaccagcactctcccttcaaacagactgtgatttgcaggtcactggtttaccaagccaggc
tacccaggcaggacccagatgccaagcccagtggtgtcctgcaagctgagcagtgctcagttcttgcaaaaaaa
ggtctgtgtgaaggcaaggcctctgcctggcttctcaccccagttgggtgtctggaacaggaaggagcccttac
tgcagaaaaaggaggagggagcaaagggagcgaacagctgcgtgctccatggggaggatccccaaagtagaaag
gcgcatacacactgcagcccttgacccagaatgctcacagctacattacagattcaggtctcctcagtgtagtg
gggctgctgatgagactgtggcatcctcaggggtcaggacacacattttccatcactcttctgatggcaaaaaa
cctctgagccaatgccaacctctgatcattaaaaaaaagtgctcacagcagtgtgtggtttaggatcatgccct
gtgtggtttggaacacgtgcacaaccacaccttgttcatcaccatcccagaaaccctgacgcaggcaaagagca
gagttattaaccctactttactgatgtggatactgaggcccagaggctcatgcaagttatcaataagtggcagg
gacagttgcctctagattaactagcccctaggatcacctgggtcttggaaggggacccataaacatgagctccc
ctctcttggggccagatttgcacctgtgccgcgccttcagectgcatgaagtaggggctgetggcaaagactea
aagctgtaaatctgggttttctcttgaggcttctaagggagctgtttcgacaactcactctgttcccagctggc
tgcccctgcatagggttttaaagcagcctagctttctgccaggcttggcagtggacaacgctggtcagaacatc
ccagagagctaccagaatgaagtaagtttgcttctactctttacctgtttatgggctgtctctgccactggaat
gaaaggcactgagaacagtgcctggcctgcagaaggccctggaaatacctgagctcctaatctgggaataggag
taggaagagctttggaggcagggcacctgagtttgagatctacaacttcctgcctgtgtgacattgggaaagtc
tccatcctttctgagcctcagtctccaccctggggaagtggaaatatcaatctctgtgacacagaagcaaatga
gcgaatgtgcacaaagtaccttgcacaagagagacgctcaaacacttgcctccaggtttcaccgagaactacag
agtaagatagatttgttcccagtggaggaagcctgggaataatttgcccctagactatgaattcctggggctca
agatcgagcacagggccaggcacacagaagggaccctggaaatgtggcaggaggccagagatagacaggccctt
agagctcatacccatgccctctgacctcaagaagaaagaaacctgctcaaaatctcacaaagagcttgttccaa
ccctgaatcgagtctgaggactccttcctgagtccagcactttttctgcaagaagtatatgcctccaaagctga
tgggcgcaaatcttgaaccccgtcacataaacacaaagggaggaggtgactagagctcctcctactggatatgt
ctaaggtcaccagtctaaagaaaagggatggatagaatgaggccagtatttttgcagccatccaaatgtccaca
tacgctgttacactgagggctcctctctcccccgtcttcagccctacttgcatttagaggtgagaaagatatgg
gctgaggggttgtttttcatcgtattgtagatggaaagcacactgcccttggggccatccaaatgtggaccttg
atgtagcaccccaccttctggatggccatccttctgaaagtcactgaatttctcagactttattctctttatcc
ataaagaaggagaataataataatccccccaccctgcccaaccactgactggttgggaagctcagaagaaatac
tgggcacggcatcccattgtaatctatagagtgagtcgcttcttaatattaaatggctgaacacagaagatgtg
caaaaagtactgtgtccccttcctcctccaactgaacatttcatgccctttgcaccctcattttgtctaggagc
tgccttatgaagggaataggtacctgctccgagctggaggaatctttgccacttatggtggggtatggactgag
acagagatggcatgtgacatgcgcactgagtctcaactccatgcaggctctggagcactctcaaattggagtac
taatgccttttaaattctcacactagcaatcctttgacctactgatctagggatctagggaaagaatcgtgate
ttaacttcaaagggaaggacaaaatgttctgcctcctgttaaaactccatacactaagtgcagagactggatgc
cttattaaccttgggtagatgcccaaatgttcaaaaggtcaaactcttctgttccccagatcgccagagtcatt
aaccagtcacactattaaatgaatgaacagatgctgaaaaggtacttgcattactgagatttcttatggtgatg
gcccctgcctgatatgtattcagcattttgtagttttcaatgtgcattagagtatagtggtgatgacattggcc
tctgagtttgccacttcttatatctgtgactttggtcaaattgcttaatctctctgagtctcggtttcctggag
ataataatagcttcttcttcccagggttatcatgaggattacaggagataatgccccaaaaatgcttagtaaag
tgcctagcacctagtcaatgctgaattaaaggtggttattcttacttttcgttcatttgaactttgttctcagg
gagggcaaaggatagacaaagccccatagctagtgaggagtagctgcaagactagaacccaggtgttctgagcc
ctagtcttaggccaagaacaactgttacgtgagatgcacgttttccttcaagggagctcacaattatttccatg
taaattcaaggactgctaaaagagaactctcctctgggactgatatcattttatttcaagattgatttgaaaca
tgttttttgtttgtttgtttgttttctaggaaagaacaagagaaccagttaagctgaatgcctgaagcaaatcc
ctgttagcgatgttttcaggatgagggagagtggtgcaagaaacgtgcttccagatgcacatggtttcctggga
ctagggttcagggtgtcatccctgggtgttattaagtgtcagaaggagagcaaacaagggaaacatctgagatc
cagctaaggctacaccctggaaatgcaagcccagctcttgcaaaggacctcctttggccactcaccttccaggc
cttacaataacttgtttggactgcaggtttcttggtggactcacaggccattctgcttttatttggtcaacctc
agttcacaagcacccagatgetgagatcctcagcatgtgcagcagagtttcatattagcactgggtacctttct
gaggctacagggataccgtacagcagcacctgtcacgtccagccaaaggagtgggctctctcaatgtcatccaa
tgctgtttcaactgtgaagaagaccatctgagagagttgcttttggaggctgaggcaaatttttaaaattcttt
gttctcctcaactggggtgaattcttggtcttctaggacagcttgaagttttagaaagagtcaagccactcaga
accaacagagaactctttcagagaacaaggtgtggcatagaggaggcagagggctgatcttgatcaaatccaaa
gtgtgactctaaagcaatgaatgtgaatttttggcaaagcttacaaagggctctaaaggccatctgcaaagaga
agccaagcctgatcgatgaatcactagtgcggccggatatcgatcggcacgctgttgattttctcatagtaagg
aacagtgggccctttcagtcccacttctgtagtctgtggtactacaaatggtgagcccatgatgttgccattca
tagggttattctccagcagtaatgactggccagccactcccatagccgcggggctaggatttattgtcaatgga
gggacctgcagttctgcacaagcagtactaggatgagcacctgggcccattgcaagggtgacatcttcaaggca
aggcctcttaattttattagggtagcccccatcagecatgtctggaaactggaagtggtcttcttcttgtctcc
tcttaacagttccctgtgaatggaagagaagagaggaggagaagagaggagaggagaagggaagagaggtgaca
cacacacacacacacacacacacacacacagagagagagagagagagacagagagaaagagagagagagagaga
gaggaatttttataaaggtttggcacattaaagctaatgaacaggaaatgtgcatgataaaacagacctctcag
tttaaagacttatagttgtgaaaactataaaatacagcctgtctttggaaccatagtgcttatttattcattat
tatgtttcatctaaactgtctaattacatttcaaataaggcattatgttgtctgtatactaaaacgggatagaa
cgttattcaaagggtaatctgcccacttcaaggagagttcaacaaaactatgcagaagtcactaaatgaaccat
gctgccaaaggcaggcattggagagaaaactagaagtagctaaatagttttaattctttcctgtctacagacac
atagattttaacgaaggaataccatagtatagaattgaacttttaggctgccttctagtcttggttaaatgcat
caggctgcagtggtaaaattgaatacaacagagcccttacaggaaagaagtagatctggatgtgttttcttggg
gagctgtttaaaatactgtttttgggaaagcacaagtttcagaacagtcattgtaggcatcgtattcattgttc
catttatttttacacacacacacacacacacacacacacacactctcacacattgctatgtgtacacaaaaata
atttggaagaacctatacccaacaatttggagtggtcatttatttgggatgactggcaattccctttctattct
cttcatttctgcttgtttgtctttaacgagaacgactcataatccaaaaatttaaaaaagtataaagttatcta
aataagaaattttcctctgaagatgcatcctcaggttggggagatattaaacaatgagaaaaggccccaatctg
ggatctgaaccttgggggagctgcccatcatttatagaagcacagcctttgggaacaaagcaaagtcactagca
atgtgagacttcctactcttcatggcttcatacagtcatccatcgctgttgtgttaatgaccatgacctgtatg
ttagcaggtaaatgggaaaggaagtgggggcaaaggagtatgtgcaggaatgatcaaaataaggaaaggaagag
agggatctggaaatcacctgaatgccgataggtgaacaggtagaattcttttaaagcttcccccacccggtacc
ccccaaataacccctttccagctttggaagtttcactaggacatacagtgctcatcctctgatgtcaccttaag
tttggctcttctggtttgatgagcttgtagcccactaggagctcaaggcatgcatggggccacttgccagcacg
atgaggggcatgactgtcatggccaagtgaacatcaaagcagatccccagggctgtatgtctcaggccttggtg
cacatcagaatcacttagaaacatccacattcctgggccctcccaccacaaactgacagcttcatccagggtgt
ggcccaggcatcgggagtttttccaacagctccatggctgattctcaacagaaaaccactggcccagagcaagg
gtggaggcagcgtggcatagggctctgaccttggccttgccactgaacctctcagagccccagtttctttatgt
gtaaaatgagtgtaattatagttcttttctcatgaaggtgctctgactattaagtgaaacggggcacattgtat
gacacctaatagctcctcactaactggtacccggcattataaagggcaggtatggaagggttctgggagtccaa
tacccttcttaaagacagagaggtctctgagacccagagaggggcaggccttacccagagttgctcagccagag
ggcaacaaggcccaggtcagatgcagggcccctccaccaccactcagctgcctccagacccactgccttcgcca
tgttgttggtaggacactgcatcgcccccacagaaggggcttgccaacttgagtgagaggacttgcacacttct
ttgacttttcttttgagatgcccacaatctgaacaagggcacttcaagggacagctctgtcaccaaactcatct
gaggcctgaataccatgggtcaggcaggaatgggttggagaggtgtagagcaggcacaataagagggctgaggc
ccatgcagtcatcagtgcccactttcccaggagtctgactgggcacagcacccatagtgtccctgagctggtcc
atggagcagctcactaactgtttggcccacagcaggtgctcagtaaatggcagttgaacgaatcaatggacaaa
ggaacataaattacccaacacacagggagctcagccatttactcaatccattatggagtaacctacaaacaagc
cactgggtcccaaactgaaattgtgtctcttctacattctcccaaagaatccaataggttaaaaatagaaatgt
atgaaatagatcaatcagggatgattgcatgtggatttgacataaggatcccctgcagggagtctgagctggca
acagtcaggcccaaagtgctgtccatgatgtctcgaactgcaagacagttttaacaatggcgaagcaatgcaga
accaggcaggccaaggagggggtgggggttggggaaaggaagggagggaaggggctgtgaggggcaatggtctg
gcatccctgccacgtgagcctctgaaatttgctggcagcttctatgggctcccagagctttcacttaattgttg
gtctgccactaacctgctgggagtaaggtgcagggatggaggaggcagggcatgaccaccagacactaaaggta
ccagctggggccactggcaaagggaaggaggctgcacctctcctacatgagagcccgtatacacacaccttttc
cagcactcatcaactgcatcccaagcaaatggtccctgatcaattccaattctagaaaccaactgactactcaa
taacaaagtagatcccagcaggccgccactgctggagcggatgccacttttgctatgccaagtctgtggctgga
cagctgctggcatgtacactcactgactttcataaggatgcctaataaagggggcaggctcacctggcttttct
caggggtggggtttggggtgccgatagaggctgctgttttggcagagtggcaagctgcaagcctcttctgagct
ttcatttttcaatggacttcagtgagaattcactttgtcagaggccatgcagctccatgttttggatttcatgg
aatgagctttcaacagtgagectgaagtgccctggctgaacageaagaacaccagecaaccetaaacaaggceg
aggagaggcggctgtgtttacacggaaggctcagccttgctgtaatagcgtctgccttcaccagacatcagtga
ggcgtggaaatctattatccagttaattttgcccctagataaagacttgctttcgtgtcttctctttcacagtc
ccatgatctgttactcatctcaactgcgagaagttggctgggctttcccctgtgcccagtgccacactcgtgcc
ttcactgggtcacctgtgcctgtggctgatgccgctgaggttttgcctgcccagactgggtgtttctgactaaa
tcccacagccaccattttagatcaagggcaggagatagctcactgctccggaatgacctcccctcccagaatcc
tggtaggggcggaaggtccccaaccaagctcccagccctttctaaatgaatctccctgcttcacccatgtgctt
ttctccagtctctgcggtcttgatgacagcagggtattagtcctagctgtcccacagctcctacttctttcagg
cctctccctgtgacaatcagtagccactggcaggatttcctcagagcatatctcgatttgctttcagacaatta
gttaaaaggacactggaccccagacgtcccaactcccagccagagccctcacaggcccggcctttggtggtgag
gaagggggagggagtgagtgacagtgccctggcatcttttagaaacgaattcctttctctccatacataaatgc
ctgcagagtcccatttcagaatccggcagacaaagccaccaatgtgatccccatgaccttataaacattcatta
aaatgcatttcaaggcatgtgatggcctccccaccccctagataatgagaaaacaaaggtttctcttctgatag
agacaagttcagctctgaagtcaacattatttctggttctgtctgaacaatgacatatggcaactcttcccttt
ctatagttctagtccagaatgacaaaaaaggggaaaaatttcttagagaaggtagagattatacgaatacagtc
catgaaatgagcataaggagaataaagaatataacttatccaaagaagtctggcaggctgttataaatgcttga
ttttggacactgtagttggaggtttaacatggacaccaataaaaaggtcagcaaagggtatgcactgttcctat
tgggcaagaagataggaggtcaaaggtaaccaggaaagataaactcagggagacttattttccctccagagggc
actgggcttgtaggccctgggcaaaattgtcaaaaaggtgaaaatcgcctgtggtttatttagtctgctctttc
ttcactagtgcctcaccagttcagttcaggccaatttgctagaaggtagcgaacgatcgaccggtgaagttcct
atactttctagagaataggaacttcggaataggaacttctacetagatgeatgetcagagcggcccctagetag
cgtttaaaacctacagttgaagtcggaagtttacatacacttaagttggagtcattaaaactcgtttttcaact
actccacaaatttcttgttaacaaacaatagttttggcaagtcagttaggacatctactttgtgcatgacacaa
gtcatttttccaacaattgtttacagacagattatttcacttataattcactgtatcacaattccagtgggtca
gaagtgtacatacacgcgcttgactgtgcctttaagcttttaattaagagtaattcatacaaaaggactcgccc
ctgccttggggaatcccagggaccgtcgttaaactcccactaacgtagaacccagagatcgctgcgttcccgcc
eeetcaccegeeegetctcgtcateactgaggtggagaagagcatgcgtgaggctccggtgcccgtcagtggge
agagcgcacatcgcccacagtccccgagaagttggggggaggggtcggcaattgaaccggtgcctagagaaggt
ggcgcggggtaaactgggaaagtgatgtcgtgtactggctccgcctttttcccgagggtgggggagaaccgtat
ataagtgcagtagtcgccgtgaacgttctttttcgcaacgggtttgccgccagaacacaggtaagtgccgtgtg
tggttcccgcgggcctggcctctttacgggttatggcccttgcgtgccttgaattacttccacgcccctggctg
cagtacgtgattcttgatcccgagcttcgggttggaagtgggtgggagagttcgaggccttgcgcttaaggagc
cccttcgcctcgtgcttgagttgaggcctggcctgggcgctggggccgccgcgtgcgaatctggtggcaccttc
gcgcctgtctegetgctttcgataagtctctagecatttaaaatttttgatgacctgetgcgacgctttttttc
tggcaagatagtcttgtaaatgcgggccaagatctgcacactggtatttcggtttttggggccgcgggcggcga
cggggcccgtgcgtcccagcgcacatgttcggcgaggcggggcctgcgagcgcggccaccgagaatcggacggg
ggtagtctcaagctcgccggcctgctctggtgcctggcctcgcgccgccgtgtatcgccccgccctgggcggca
aggctggcccggtcggcaccagttgcgtgagcggaaagatggccgcttcccggccctgctgcagggagctcaaa
atggaggacgcggcgctcgggagagcgggcgggtgagtcacccacacaaaggaaaagggcctttccgtcctcag
ccgtcgcttcatgtgactccacggagtaccgggcgccgtccaggcacctcgattagttctcgagcttttggagt
acgtcgtctttaggttggggggaggggttttatgcgatggagtttccccacactgagtgggtggagactgaagt
taggccagcttggcacttgatgtaattctccttggaatttgccctttttgagtttggatcttggttcattctca
agcctcagacagtggttcaaagtttttttcttccatttcaggtgtcgtgagaattcgatatcccaccatggaca
aggattgtgaaatgaaacgcaccacactggacagccctttggggaagctggagctgtctggttgtgagcagggt
ctgcacgaaataaagctcctgggcaaggggacgtctgcagctgatgccgtggaggtcccagcccccgctgcggt
tctcggaggtccggagcccctgatgcagtgcacagcctggctgaatgcctatttccaccagcccgaggctatcg
aagagttccccgtgccagcgcttcaccatcccgttttccagcaagagtcgttcacgcgtcaggtgttatggaag
ctgcttaaggttgtgaaattcggagaagtgatttcttaccagcaattggccgccctggccggcaaccccaaagc
cgcgcgagcagtgggaggcgccatgagaggcaatcctgtcaagatcctcatcccgtgccacagagtggtctgca
gcagcggagccgtgggcaactactccggagggctagccgtgaaggaatggcttctggcccatgaaggccaccgg
ttggggaagccaggcttgggagggagctcaggtctggcaggggcctggctcaagggagcgggagctacctcggg
ctccccgcctgctggccgaaacctcgaggtgaaacagactttgaattttgaccttctcaagttggcgggagacg
tggagtecaacecagggeecatggtgageaagggcgaggagctgttcaccggggtggtgeecatcetggtegag
ctggacggcgacgtaaacggccacaagttcagcgtgtccggcgagggcgagggcgatgccacctacggcaagct
gaccctgaagttcatctgcaccaccggcaagctgcccgtgccctggcccaccctcgtgaccaccctgacctacg
gcgtgcagtgetteageegetaccccgaccacatgaagcagcacgacttcttcaagtccgccatgcccgaaggc
tacgtccaggagcgcaccatcttcttcaaggacgacggcaactacaagacccgcgccgaggtgaagttcgaggg
cgacaccctggtgaaccgcatcgagctgaagggcatcgacttcaaggaggacggcaacatcctggggcacaagc
tggagtacaactacaacagccacaacgtctatatcatggccgacaagcagaagaacggcatcaaggtgaacttc
aagatccgccacaacatcgaggacggcagcgtgcagctcgccgaccactaccagcagaacacccccatcggcga
cggccccgtgetgctgcccgacaaccactacctgageacccagtccgccctgagcaaagaccccaacgagaagc
gcgatcacatggtcetgetggagttcgtgaccgccgcegggateacteteggcatggacgagetgtacaagtaa
agcggccgctcttcgagcagatatcataagatacattgatgagtttggacaaaccacaactagaatgcagtgaa
aaaaatgctttatttgtgaaatttgtgatgctattgctttatttgtaaccattataagctgcaataaacaagtt
acgttaacaacaacaattgcattcattttatgtttcaggttcagggggaggtgtgggaggttttttaaagcaag
taaaacctctacaaatgtggtattaattaaagatctttaaacaatttaaaggcaatgctaccaaatactaagcg
cgtgtatgtacacttctgacccactgggaatgtgatgaaagaaataaaagctgaaatgaatcattctctctact
attattctgatatttcacattcttaaaataaagtggtgatcctaactgaccttaagacagggaatctttactcg
gattaaatgtcaggaattgtgaaaaagtgagtttaaatgtatttggctaaggtgtatgtaaacttccgacttca
actgtagtttaaaaegggecegtagtctagggcegeeagtgtgatggagttcggcttcaggtacageacactgg
cggccgttactaggtagctagagccttcagactctagggaagttcctatactttctagagaataggaacttcgg
aataggaacttcacccatggcgategetagectctaactcctagaccgtcagaactgetgggccettcaagacg
ggctgctcacacccactcatgttaagcctggtgaggcctgtactctgttttcacaggaagaaatcctcacccag
tcttccccaaacacattcccaggttgtgtcattagtgggatagagatgattattgtggggagaagagaaacatc
tggatggatttggtgaggttgatctatagaggaagtaggtgctgcctgaggtagctgtaatagaagctaaaggt
caaaggagagggccctgtcccaatccagatgactccacttctgetggacccaggttcacaagcttaatctacat
ttcacctaaatttggctaacaagcccaaaatcacacaggcaaagggagaagtggaggcagaaccgaggttggag
gccaccagggccaccgggcagagatcatttaagcccaaccttctcacttctccctgggctctgcctctcttaaa
ggaccttgtggtgtgacctcttgtaggtccctttcacactcggggcctcagtttccccactgtaaagtgaatgg
gtcccagctttggtaagettatgettacctgatgetttcttcctgggctgctcttgtagagaaaagataaatct
tcttcctccatccacgagggctcctttccctgggggtgagagtaggctgaggagagccacttgcacacaccctt
aaagaaagtattacctgcaccagctcagtgagaggcacagatcagactgttacttgaatcaaattatgagcctc
cccaaatatatctatgacatttaaataggggattacttgaacatagactgtgggatccggtgtggagtgcggga
gactagcaaagtgaatcctgagagtagcaggtctgcacctgttggatcgagaaaggcggcctacaattctggtc
aaatgagctgtgcttattgacatattctattagagagtactaccaggtcaccagtcaccagaaaggctgccagc
tctccaaccacctccagggaactatcctgaatggggccttaacaagtctaagagagggttggtttgggtcccaa
gccaatatttgctctgctttatgtcagtcatatggaacccaaaccaaccctctcctatgtgcctcaccagtcgg
tgcagggatcccaatttcaagtttggttttttatggtcaaagtccagcatagattaaatgaaggggtgtgatga
tggtgttaaaagagaactccagaccagtttaactcttggacacacatcccatctcaccatggtgcttccaacct
tccagagatgatgggctcctattttctgatgacaaagccctccacaggattgctgcctggccatcagggagtgc
ctctgtaactgaggctgagatcccactttcagtcctccagctgtggcccatccctgctccgcccaccgggtatg
gcctgtcctaggctcttaggtatggctgcattgtgaaatgatggctacagagctggcatctcctgtagtctggt
tcatctagtgcactacctcatagttaaaagaaatctgtttaagccactgagggtggctcctagtgccaactcca
agaacaggaagcttcccttttttgggaggaggggcagatggtaacatggatcgtccaggtcaatgggagcaggg
caaccacagtaagtactggacaacaacacaaaactccatgtgtggcttccatcgagtccctctccaattggttt
ggtcttctccgtcccatgcagcactttagcaaggggcctggctgaaggctatgaattgtgtggagcctcctcat
tgcagtctccaaccatctgatgctgggaaaatgtcaccaggatgcagccatgccgtgtggccaatgaaccgaga
aaacaccccttttctagaatgctctaaagaggcagaataatccagaggtgaggaaggaaatactccaccagaga
cccaggcagttcctacaaaagccagactttccttcacctagggagtgacaagaccagtggaaaacactctcaag
cagtaacccccaaatgctctgcaagccagtggcgtccagataccgcacaagcgagtgggctgtctaatcccatc
atcatgatgtaaatatctctaggctgccctgggctgtgcctgaccctgtcttcagctttccacacctccaccta
cagcccatgcacagaaggaccacccaggaatgctgcaagtgtggcacctccagggccacccagggagaaggagg
gcagctatgctggtggctccaggcccatttggcgggtggtaccttcacaccacaaagcccaaactgaggcccca
gatttggctgatgagggcatattggacaggggtcacttatgctcttccccattgccacctggcctctggctacc
tggacttggctacctgtggatcctctcacaggtgccaccatcttggctgagtctccagatgcgaggtccctgag
gcagtggcgggcttctcgctaatgctgatgggattaggaatgggataggtggggagggccctggactgggccct
gatgagccaagtgggtttttagaggggctactggtacatttcagggacaggacatctggtagagctaagctggg
gcaataaggagccactgctaatctgagagctagaaacaatcagcttctgggtcattattaattagggtagtttg
ggctgtgtggaagtcacgtactatatggggtagccacagctctctctacagataatctctaagacttctgattg
ggactgtgtgaatgcagtagcaatatctcttcttactgccaggccctgccagtcctgcctccacgccctggctg
gccccccttatgatctgacccatgccaggctgccatagtatgttacttctgcattagcactccttgggacctgc
ctctccactgtccctcagactttaaagaactatacaaacccaaggggctcttcccaagagaattgatatgactt
gaggtgattccatttctggaagtagtcactccattttctgcctcactctttcagtgcttcacagagcaggttcg
aacgaaggagccatccaactaaccgtcatgttcgggcaaccgaagaagggagtggcaggatttcctttggagac
ttctggaattagacagcagtttaatgcaagcatctaaattctctccctcccagagtctcattaaaactacagta
agagtttgtgttttgttttgtttttaaagacaaaatcccaccaggatagagagaataggagaggagataacagc
atcataatttatgaaactaaaatgcagatagaccaggattaactgactacacagcaccaaggaagctgaatcac
aagacagcagaggagaaaactggaaaggatcgtggtctatacggcagaatcttcccaagcctcaggaggaggag
ctctagatgttcccagatctgggaggtaaagtggaatggggggacatggtcagcgtaatggggttgggctggaa
gcaggttaaggagcaggcagatctctgaatcccctctctgactctgtgtccccaggcatctgcctgtcccccac
cctggaagaggtctggcttgaccctttgtctggtgaatttcctgctctgctttcctggtcctgctggccggatc
agtggaggccactcacttcaccccacagggatgttctgtgttgccctacacctgggaactggaggtactggagg
caggctgtggtgagcttgaaagcaaaacacagagggcagtccaatctctttggccatatttcttctgcatatcc
aataccatgtccacaactctgctagtgtcctgatggtggtgggctctacacattcccgggaagctgaaggcaga
taatgaccaggacaggtcaacctctcttcttctgaaagccttcatctactaatggcctgggactcttcccttaa
atgcttagattgtgtcttccactaaggttttttgctgttgctgttgtttgtttgtttgtttgtttgtttgtttg
tttgttttgagacggaatctcactctgtcgcccaggctggagtgtagtggcacaatctcagctcaccacaacct
tcacctcctaggttgaaggggttctcctgcctcagcctcctgtgtagctaggattacaggcacatgccaccatg
cctggctaatttttgtatttttggtagagacaggatttcgccatgttggccaggctggtcttgaactcctgacc
tcaggtgatctgcctaccttggtctcccaaagtgctgggattacaggtgtgagccaccacacccggccaaggtt
tttgtttgtttgtttgtttgtttgtttgttttgtattgaggcagggtatcactctggtcacccaggctggagtg
cagtagtgcaatcacggctcactgaaacctccacctccctggcgggctcaggtgatcctgccacctcagcttcc
caggtagctgggactacaggcttgtaccaccactcccagctaatttttgcgtttttagtagagacagggtttcc
ccatgttgcccaggttggtctcaaactctgggctcaagcgatctgcctgcctcagcctcccaaagtgctgggat
tacaggtgtaagccaccgtacccggccccgccactaaggttttgaaaatgaagcaattacaagtttaagtctat
taataagtgatgaagccatgtagaaaagcagaataattatcttggatcaggaaggtcacatgaggatctacttg
ggggttgtcaatattctatttcttgacctgatcagtgttgacagcaggttttaattttttacttctttttgttt
gtttgtttttgagacggagtcttgctctgtctcccaggctggagtgcagtggtatgatctcggctcactgcaac
ctccgcctcctgggttcaagctgttctcctgcctcagcctccccagtagctgggattacaggcaggcaccacca
cgaccagctaatttttgtatttttagtagagactgggtttcaccatcttggccaggctggtctcgaacttctga
tctcgtgatccgccctccttggcctcccaaagtgctgggattacaggcttgagccagcgtgcccggcccatttt
ttacttccttattaaactgtacatataggccttgcacacttttctgcatcaatgttatattccacaataaaggg
aaaaggtatatacacaacttgataccagtaatgtgaaacatatatttctacatagaaaaaaaaatgactgaaat
actgcactccaatgtgttcacacagtagttgtttctggattatttatatattaaatgtttatatattgtattat
gccatgaggtttgtgttttctctccacttttctgcattttccaagtttactacaaagagcacatattactctta
taatcagaaagtcataaaatatatttaaaaagacaaaattgaaactaataaggatcaacacaaaacagatgagc
catctgtggaaatccgcacagaatactacctaaagagattggtgacgtgcatgatctcactaggatgagcacaa
agcttgccagagcctagggtctatttctagggttggctcttggaagccaggatagttgttatctctgggaagag
ggaggggcacacaaggggcttctaaaacattctgaatgttctatttctgaacctggttggtgggtacatgactg
ttggttttattattatatgttttatatactcttccgtatgtatggtgtggattccaaaaaaagatttcctttag
agaaaaccagaatcacataagtagaaaatatggtgctatgttgaaggaacaactcaagtttatataaaatcatc
atcatttataggcttaaaaagttgctttggaattttggtctaactgacttgtcttttctgcagcaaaccacgct
ccttctggacgtgctccaggcagaggggattagggtgggttcaaggctgcaagtacctagctcagcacactctc
ttcaggggacttagagtttgtctggtgttggctctctgagctcttgtcaggaatgccgacccttccgaggttca
ggatttgaagcctgccttcccaccccagatttggtccacacagacactcaagtatgtatttcaactacaaatga
cctgtactttcctattactcctctctttcatggtaacctttctggtatccttccttccctacatttatgggagg
gggacatcattctctgctctcctgtcactgaaggctccaccttctgtcttcttctgacccatctggttttcctg
gggccacctcctctccttaccaccctaacgcttttgtaacttgaggagaaatgagagatcacctagtcaggtca
tcattctctgtagatgaagaggcccaatggtttgctcaagaattgccaagcgagttaaagacagagagtatgag
agtcagcaagacctacagaaagcatctatctgcactgttttgcagggacttagcctttgtgtgtggactcctgg
aatgccacccactaagaaacattgtctgacaccaactccccacttggtaggtggggacactgaaactcatggca
ggaaagggccttgccccaagccagggcagagtgtcactcatcactctcaattttcagtccagggcaccttgttg
tgactatcccaaaggcagccactttccctggtctgaaagacctgaagagagaagagaagagaaggatggaaggc
agagtatgcggctttgattcatttcctggtgaaaacagatctatacgagaagcaaatttcacgaaagggaagag
aagaaagtgtcccatacgttgctggcctgtttcaaccttgctttgattcttgctgaaaagggtaccgtgtattt
ctgagttcaacatgcagaccagtgttaggaaagccactgcacctccactttagcctccagggctgtgccctgca
aatggcctgcagccttggtgcctcgctctccagactgcattttggaagatgggacagaggcttatggaagccca
cattagaacgggggagcagaatgggtgagatgagggatccttgatagtgaaccagatgaaggaatggtagccaa
atgccaggcctcctttgtggcttcaatccaaaggctctggagcccttccagggcagaacatcaggcatgtttac
ccccactgtcctcaacagtgacagaggtgcaatcttgggcagctggccattttgaaagcaacctccttaatctc
aactgggaaggctccctagcaggacccctgtgttgcacacctggaggaagctagactaaccagaagctcagcac
ggttccatctgggatgcccaggtctgagacgaaaaaggtaactctcttttctgggtcctggcccagttgtgtct
ctctccacctcattctctgagatgcctgtctccccttttttgtcccatcaggaggcaagagctatcactgggcc
agactccaccagaagccaagccagcttgttacccagcttctcagggagcaaagaacagccttgtttctatctta
tccccactgtcccctgcccctgccccacctcccagccattcagcttctggcttccccagagctgcctgcttctt
tgtggtcctccattccttgaaaagaccttctagtcattagtgtatataaatggccacttagcccagattacagt
gaggtcaacagctggggctctgagaattgtcacacactggcacaggagaggaggctattcttccagagaatttg
gagggcactcccatccacttacaacaaaaagcccatccactgtgcttggcagtaggtgatctgagaaccaatgg
aaccaggttaatcctgtggcactgttgagtgaggagagcagtggcgggcactggaaaatatcagagacaaggca
ggagacctgaaatctaggcttagctcctcatatacttggcagctgtatgacctcagacaaccagtgttacctct
ctaagcctcagtttcctcatgcaaaaggagggggaataacaacagagcccactgcttgggggtgttgtgaggac
aggatgaaaaaacaaacagaaatccctcagtacaggattcagtgcagtggacagtcttgcaaggtctggttcag
ccctccacccctaccctcaccagtataaagaactctggcctacaagtcagatgacctgagttttaatctcagct
ttgccattagccgtgtgaacttgagaaagtccctttcctttttacatctattgggatgatcatgcattttttgt
cctttattctgttaatatagtgtgttacattgattgcttttcatagactgaaccagccttgtattccagggata
aatctcacttggtcatggtgtataatcctttatacaaatgttgctgggttgagtttgctagtattttgttgaag
atttttatgtcttgattcataaggaatattggtgtaccttccccttttatggccacagtttccctacaatgatg
tagtcgaactagacaacctccaatatctttcagtattcatgtcctctgattctgtgaaactaagaaaattaaga
aatagtgattcataggcacaaggcaggcaaaacttagactccttgtagaataattaggaagccaaatattcagt
gtgcttatttctcaaataaccttagtttctccagtctgccccaactccgaggcctgaatatctctagatgctta
tgatggcaactaaagcctaaaagctaattcattttaaagttcttccaaatgcatagggttttatttttccagac
ctgggttcagatggggaatttgacaaacaatggaaagggggaaaaacaacaatctaaacactgagtgacaaagt
aacaaagaaatagtctagctatcagccagtcaagccagccttggctttgctatccaaagtagtcagtctaattc
taccaccagtttctgttcctgtagctgtctactgcctgccagggactctgccttcccacccacaactaccaatg
gaaggatgtggtgaccataccagtggctgctgacatctcctgccatgggaagcataattgcctccagcagcctc
ccccttagatccatcatttttgttgcacttggcctgggctgtactcccggccaatgactgaacatggtgagcat
agtaatgcaggcccatttctgtgaggagcaggactcctccagtaggtgactttggctcaaggactctctattgg
cctggttgaacttttcctgaactgtgctactgtctgagactcttcttacccaatcctctttctcgccccaattg
tcacagaccacctgcattgtggtctgagtctctccccaccttctcttgctcttccctgtttatctttcacaggc
atttcccccagtacattccttgaatgtctaacccgatacgggtgcctgacttttggcagacctaagcagacaaa
aaggagtacttggttacctagctcttctttctaccacaaacatcgagggaaccctttttccctcacccctctgc
cacacccccactgccccagtgaacaaccacagagagagctgtggtataatattaggctggtgcaaaagtaattg
cggtttttgccattacttttaatggtaaaaaccgcaattacttttgcacctacctagtatttgtgtccccccaa
attcatatgttgaaacctaacccacaatatgatgtcattaggaggcaagaccttgaggaggtgattagatgatg
gggtggagctctcctgaatgagattagtgcccttataagaagaagcccaaggaagctaccttgactcttccatc
acatgagaatgcagcaagaaggcaccatctactaatcaggaagagagctctcaccagacactgaatctgccagt
gtcttgatcttgaagttcccagcctccagaactatgcataatgcatttccattgtctctaagccacccagccta
tggtattttgtcatagcagcctgaactgactaagacagtgagccacatgagaagtgccccaacccctcccttaa
gcacttggctcacagatcagtgggttcatttctgcctgagttttattgttattctgtagatttcttgggctaga
tatatttttctgttattttccttcttcacctcagtcatgaattggttgttttaaaaaagacaatgtaagtcatg
gggaaactcctgacaactctactctcctagggttcctgataaaaggggattcagttgagtcctctgatggtctc
tacctgccaaagtccagcagcccttagcaaacatgetgetcgtttctgtagagaaggtgetggtgtcccaccat
acttctctctccctcatgaagggcttgcgacccagcaaatgggtggcttatatgggtctgtttcaaaggaagag
ccagctctgggaagaaaaacgatgagcataagcataacctaccactgtgcctgggaaagcagacaacttttttg
atgtgtgaatatctaatgagaatggaatccatcaattaccttaaacttaggcacagtcttcaaattcaatatat
gtgggatatacttttagtcagtttgtagacgttatttgtaataaataatctggcttctctaaagaaattatttt
aagtgtttggtttggtttgatttaatggtaaaattatatttagtggcagagaattatagcaatggtgataaact
atagagtgtcataagttcatatcttattctcacatttgaagctgcctgcagatgcattcaagatgcagccagaa
gtcaggagactcaggctgttatttggagctcatcattttacagccttgctggactcccactttctcaggggaaa
aatgtggtgttgacccagattagctctccaggccctgctgagttgggcactctgtaagctggagggtcttctat
tgtcttcacctaagtgtcaatcaacaacccaaatgggcatgggggaagagggagctgggccaatgcccagggtg
cctggtagagagataccttgggcactggaaggcaccagcttcccagagagaagggggagggccatgaaaaagtt
ggctgtagatgccagggacactgggactctccagctgtgtgtttgtgtcttctgaagacttatgtttcattcct
ttggagcatgcataatcatacactgtgggatgtgttatatagattgcttgatagttcaccactgtaataaaata
ctgtgactggaatctgctcccagtctgcctttgatagcacttgtgcaacacacatttactgagcatttacagtg
atccaggacctgtgttgtgaaaacattgatggacaaggcagatggtggagcacgtcagtgaggatttttaacaa
aggctggtaagtgctataaaggaacattgtaggacactagagaacaaagaacaggagaacctgacttaggctgg
ggtggggcgttggttagaggaggctccttggaggacatgaggtttaagctgtgacctgaggatgaatagatgtt
ggccaggtgaggtaccggtatttgtcagccttaccagtaaaaaagaaaacctattaaaaaaaaaatacacatac
aaagcctcatcagecatggcttaccagagaaagtacagcgggcacacaaaccacaagctctaaagtcactctcc
aacctctccacaatatatatacacaagccctaaactgacgtaatgggactaaagtgtaaaaaatcccgccaaac
ccaacacacaccccgaaactgcgtcaccagggaaaagtacagtttcacttccgcaatcccaacaagcgtcactt
cctctttctcacggtacgtcacatcccattaacttacaacgtcattttcccacggccgcgccgccccttttaac
cgttaaccccacagccaatcaccacacggcccacactttttaaaatcacctcatttacatattggcaccattcc
atetataaggtatattattgatgatg (SEQ ID NO: 190)
Exemplary HDAd35 donor vector (HDAd35-T4-Ef1a-mgmt-mCherry)
(Ad35 5′end: 1→481; FRT (Complementary): 14126→14159; pT4 LIR:
14220→14463; mgmt.: 15830→16450; 2A: 16451→16522; mCherry: 16526→17230;
SV40 pA: 17259→17380; pT4 RIR: 17491→17756; FRT (Complementary):
17863→17896; and Ad35 3′end: 29579→29986):
catcatcaataatataccttatagatggaatggtgccaatatgtaaatgaggtgattttaaaaagtgtgggccg
tgtggtgattggctgtggggttaacggttaaaaggggcggcgcggccgtgggaaaatgacgttttatgggggtg
gagtttttttgcaagttgtcgcgggaaatgttacgcataaaaaggcttcttttctcacggaactacttagtttt
cccacggtatttaacaggaaatgaggtagttttgaccggatgcaagtgaaaattgctgattttcgcgcgaaaac
tgaatgaggaagtgtttttctgaataatgtggtatttatggcagggtggagtatttgttcagggccaggtagac
tttgacccattacgtggaggtttcgattaccgtgttttttacctgaatttccgcgtaccgtgtcaaagtcttct
gtttttacgtaggtgtcagctgatcgctagggtatttaccggtattcaaggattacatgagcttagaaatgtaa
ttagcatagtgtgtggcatagtgtagataccaaataaatatgatctctccttctactcttgaaaatgcaaacac
attcttggtggtcctaaaatagcctgtaacatggtttactcagcagcatttgctattcaaggcagatctgcctt
tagtcattggctgcgctcctgaacagctgtgtgaaaggctaacttttgtaaaccaaatcaaaataaaatgcagc
aaaaatttgtcactgaaaggaaatcctcagtatatccttttatgaaatgaaagatccctcatccaaacttaact
tttttaaaagtgcgcatttggagatatagccctttcttatgaatcctaattcaattttggccataaacacacgt
tgatgttccccaccccaaagcacatagcaacaagagtaggttctatattgaaaataatgacaatttaaaaacat
gtacttatttcactgtatgtggacagtgtctatgattgcatcatgaagtgtcatataaccatgtacgtgtacat
gagagagagatagagagagaagtggtagggtggtggtggtagaggggatggcgatagtaatcatggtaatggta
gaggtgatggaggtggtaatgacggaggtaagggtggtagtgatgatggtggtggtggtaatggtggtggatgt
ggtggtggcaattgggatggtgggatggtggtagccatggtgatggtggtaatggtgttgatttaaagggtggt
ggtagtgaaggtgagggtagtggtggtggaggtggtggtgctggtagcaatagtgatggtggtgatggtgttga
tgagggtgttgggatcagggtgagttcccacagtatatttcattcttgttgtaccactctgtcaacagcaccac
tgactgggacagaggaagaaggcacactctgaatgtgttattaacagaaacctcaaaacagtctgtctccttgt
agtcattcaaaattatctttttcttacctggaaaactgaaactgaattaccgggaaaaacacaggagatttttg
tttgttaatatgctgccaataaagtaattttatgtcaaatttaactacaggaaagggcaaggcattttctaagt
tcettagatgtcatgtggctaaaaaaaacaaaaggatggacageagttagatactgtacacttagctgtttgaa
gccatatattcagaaagcagatgttgggagttggtgtttgaggactgatttcctggaggtattttatataggcc
aagttcattgttctaaactctaagggcttgacttgagggaggaaaagaggcaagaacatgtttagttttgctga
cagcatcacatgggcagccctaaggctagacaactttagggcctgaagcttattctaggaaagaagcacctaca
gagtggcactgggctcccctccactatagagatgaagtcatatgacagtaaagggcaggcagggctgcctaggg
ggcccagaactgacacttccattagaatgagcacaggccagggagagaagtggggaaccagagagaaggagctg
gaattctagtaggacaaacggtaagtgaacaacaagaacaagttaagagtgtgtgcagtattctttcaaagact
gaaaaaatagtgatgtgatagaatggcaggtggctctgagcaggccaggagaaggactgggggcagagcatccc
aggcaggagggcagcaagtgggaaggccctggggtggggcttttggactgttccagtgacgggcaggcagccag
tgtgcctgtcacacaatgcaccagggaagtagtcgtgaatttgcagagggtcttgcaggctatgggaaagggat
tggattgtattttgtttgtagggaagccatcgggggacttaagcagaggaaggattggcttcatctctttgaaa
aagttctctctggatgetgatgggaggagaaatggaaggaaaagaaacacttttaggggcaagaacttttgaga
agggtggaattgggagtgtggagttggggccagctttggcacaggaggggaagctaaacacgtggccgcatgag
ggcctgtaattctacctgaaatgggtaccatttgttagggtaaacaaatgaaccaaatgcccagtgatacagac
caagtgttggcaaacttcttctgtgatggcccaggtagtaaatgtctcaggcttcgcaggccatgtggtctctg
ttgaagctctgtgtagtagacaatatgttaatgactgggcgtgactgtgtgctaataaaagtttatttacaaaa
acageecgtgggctggatttageteacaggctgtagtttgccaacctctgacctagagcatgaactgagcatct
tcttggagggaaataagttctttccaagttgccctcctcacattgcagggggccatgtaggcccattattcaca
gaagagtgggtgggcaacctttctggagcagaaaaacgtaaagatttcttccgtagtgcaagtaaggtgaccat
ttctaaaccgtgcaagtgatccagcagtcccaaaagttgtttcacttctcattgtgcgcccgttctcaggtgct
ccgaagcttccagtcctttgtagggacatggatgaaattggaaatcatcattctcagtaaactatcgcaagaac
aaaaaaccaaacaccgcatattctcactcataggtgggaattgaacaatgagatcacatggacacgggaagggg
aacatcacattctggggactgttgtggggtggggggaggggggagggatagcattgggagatatacctaatgct
agatgacaagttagtgggtgcagcgcaccagtgtggcacatgtatacatatgtaactaacctgcacaatgtgca
catgtaccctaaaacttaaagtataataataaaagaaaaaaaaaaagagaggagagaaacatcatcccctccag
gatacccttgggccttgttcttatagtcttgtacattgttgaacaatttgcatgggctagtggattaaagcaca
ccctccaccctcaggccctcaagggtctctatgataatacagtctcaccttctaccctttccatcaccatccta
ggtgctatggccaaccttgaggctgccatgttaggtctatgcatttcccacctccaccacataactctctgaag
gccaggtagtttcctattcatcttggtaaccccaaagcctcgtgacagggctcagctggcatctgcggatgtga
atgaaccattggagaaaatggtactctgcaaataactctgttattttcccatttcctgtgtaaggcctagagac
aatgactttttaattgcaccccttcccctctgtatgacactggccttctcttgtgtccagcaatgtgggtggcc
tagatgatttctaagggacttctggccaagatgaacagcagctgcatcttactgagcatttactatgtgccata
tactcagecacagetctaggggcatagaagcaggagctctcagggtcagggcagtgagtgageaagcgageace
tatgeeagecctgcctctggatggggacttgagagggtgatggaagcctgcagcactggagggaggcagacaaa
gacaggcctgtgetgagggggcceggageaagagagagggaggcaatgacagcagagacatgcetgcgccttgg
gtttgagtgcccagtggtcaaatccacttccctgtggctgatgcttgcctttctaactttggaatttaggggtt
ggagatctggtgagaaggtaggagggagatgaggaggagaagggaaaggcaggaaggaaggggagggaaaggaa
aagcaaaaggggaggaggaaggtttccaacaaattattctatatcaactgcggaaatcaaaatttgttgcccaa
atcttagaagctcatgtccctcctccccagaagtctggaatgcagcactccaggggtagcttataacccaaata
tetatctgtaaaaagagaaacattgggctttcgagctgtggattctcagtaaaagcaagaggcctcagcctaca
caggccagcccagagtttgaggaaccccaggcccacacccacagggctggcccctgggtctgcatactccctag
aaatgtgcacacttctgagcctcaactctgtcctggagtctaacagcatccctctccttcctggggcagttcca
cctccagaaacctgttaccttgggccttatgtcaaggaaactgtgggaaagagctaggcaggaatgcagatgag
gccagcatgggctcctaaaagtttagaaataggcagtgtcatgetcccaggtgcctgcataaaccagctgaaaa
atggagctcccctcaccagcactctcccttcaaacagactgtgatttgcaggtcactggtttaccaagccaggc
tacccaggcaggacccagatgccaagcccagtggtgtcctgcaagctgagcagtgctcagttcttgcaaaaaaa
ggtctgtgtgaaggcaaggcctctgcctggcttctcaccccagttgggtgtctggaacaggaaggagcccttac
tgcagaaaaaggaggagggagcaaagggagcgaacagctgcgtgctccatggggaggatccccaaagtagaaag
gcgcatacacactgcagcccttgacccagaatgctcacagctacattacagattcaggtctcctcagtgtagtg
gggctgetgatgagactgtggcatcctcaggggtcaggacacacattttccatcactcttetgatggcaaaaaa
cctctgagccaatgccaacctctgatcattaaaaaaaagtgctcacagcagtgtgtggtttaggatcatgccct
gtgtggtttggaacacgtgcacaaccacaccttgttcatcaccatcccagaaaccctgacgcaggcaaagagca
gagttattaaccctactttactgatgtggatactgaggcccagaggctcatgcaagttatcaataagtggcagg
gacagttgcctctagattaactagcccctaggatcacctgggtcttggaaggggacccataaacatgagctccc
ctctcttggggccagatttgcacctgtgccgcgccttcagectgcatgaagtaggggctgetggcaaagactea
aagctgtaaatctgggttttctcttgaggcttctaagggagctgtttcgacaactcactctgttcccagctggc
tgcccctgcatagggttttaaagcagcctagctttctgccaggcttggcagtggacaacgctggtcagaacatc
ccagagagctaccagaatgaagtaagtttgcttctactctttacctgtttatgggctgtctctgccactggaat
gaaaggcactgagaacagtgcctggcctgcagaaggccctggaaatacctgagctcctaatctgggaataggag
taggaagagctttggaggcagggcacctgagtttgagatctacaacttcctgcctgtgtgacattgggaaagtc
tccatcctttctgagcctcagtctccaccctggggaagtggaaatatcaatctctgtgacacagaagcaaatga
gcgaatgtgcacaaagtaccttgcacaagagagacgctcaaacacttgcctccaggtttcaccgagaactacag
agtaagatagatttgttcccagtggaggaagcctgggaataatttgcccctagactatgaattcctggggctca
agatcgagcacagggccaggcacacagaagggaccctggaaatgtggcaggaggccagagatagacaggccctt
agagctcatacccatgccctctgacctcaagaagaaagaaacctgctcaaaatctcacaaagagcttgttccaa
ccctgaatcgagtctgaggactccttcctgagtccagcactttttctgcaagaagtatatgcctccaaagctga
tgggcgcaaatcttgaaccccgtcacataaacacaaagggaggaggtgactagagctcctcctactggatatgt
ctaaggtcaccagtctaaagaaaagggatggatagaatgaggccagtatttttgcagccatccaaatgtccaca
tacgctgttacactgagggctcctctctcccccgtcttcagccctacttgcatttagaggtgagaaagatatgg
gctgaggggttgtttttcatcgtattgtagatggaaagcacactgcccttggggccatccaaatgtggaccttg
atgtagcaccccaccttctggatggccatccttctgaaagtcactgaatttctcagactttattctctttatcc
ataaagaaggagaataataataatccccccaccctgcccaaccactgactggttgggaagctcagaagaaatac
tgggcacggcatcccattgtaatctatagagtgagtcgcttcttaatattaaatggctgaacacagaagatgtg
caaaaagtactgtgtccccttcctcctccaactgaacatttcatgccctttgcaccctcattttgtctaggagc
tgccttatgaagggaataggtacctgctccgagctggaggaatctttgccacttatggtggggtatggactgag
acagagatggcatgtgacatgcgcactgagtctcaactccatgcaggctctggagcactctcaaattggagtac
taatgccttttaaattctcacactagcaatcctttgacctactgatctagggatctagggaaagaatcgtgate
ttaacttcaaagggaaggacaaaatgttctgcctcctgttaaaactccatacactaagtgcagagactggatgc
cttattaaccttgggtagatgcccaaatgttcaaaaggtcaaactcttctgttccccagatcgccagagtcatt
aaccagtcacactattaaatgaatgaacagatgctgaaaaggtacttgcattactgagatttcttatggtgatg
gcccctgcctgatatgtattcagcattttgtagttttcaatgtgcattagagtatagtggtgatgacattggcc
tctgagtttgccacttcttatatctgtgactttggtcaaattgcttaatctctctgagtctcggtttcctggag
ataataatagcttcttcttcccagggttatcatgaggattacaggagataatgccccaaaaatgcttagtaaag
tgcctagcacctagtcaatgctgaattaaaggtggttattcttacttttcgttcatttgaactttgttctcagg
gagggcaaaggatagacaaagccccatagctagtgaggagtagctgcaagactagaacccaggtgttctgagcc
ctagtcttaggccaagaacaactgttacgtgagatgcacgttttccttcaagggagctcacaattatttccatg
taaattcaaggactgctaaaagagaactctcctctgggactgatatcattttatttcaagattgatttgaaaca
tgttttttgtttgtttgtttgttttctaggaaagaacaagagaaccagttaagctgaatgcctgaagcaaatcc
ctgttagcgatgttttcaggatgagggagagtggtgcaagaaacgtgcttccagatgcacatggtttcctggga
ctagggttcagggtgtcatccctgggtgttattaagtgtcagaaggagagcaaacaagggaaacatctgagatc
cagctaaggctacaccctggaaatgcaagcccagctcttgcaaaggacctcctttggccactcaccttccaggc
cttacaataacttgtttggactgcaggtttcttggtggactcacaggccattctgcttttatttggtcaacctc
agttcacaagcacccagatgctgagatcctcagcatgtgcagcagagtttcatattagcactgggtacctttct
gaggctacagggataccgtacagcagcacctgtcacgtccagccaaaggagtgggctctctcaatgtcatccaa
tgctgtttcaactgtgaagaagaccatctgagagagttgcttttggaggctgaggcaaatttttaaaattcttt
gttctcctcaactggggtgaattcttggtcttctaggacagcttgaagttttagaaagagtcaagccactcaga
accaacagagaactctttcagagaacaaggtgtggcatagaggaggcagagggctgatcttgatcaaatccaaa
gtgtgactctaaagcaatgaatgtgaatttttggcaaagcttacaaagggctctaaaggccatctgcaaagaga
agccaagcctgatcgatgaatcactagtgcggccggatatcgatcggcacgctgttgattttctcatagtaagg
aacagtgggccctttcagtcccacttctgtagtctgtggtactacaaatggtgagcccatgatgttgccattca
tagggttattctccagcagtaatgactggccagccactcccatagccgcggggctaggatttattgtcaatgga
gggacctgcagttctgcacaagcagtactaggatgagcacctgggcccattgcaagggtgacatcttcaaggca
aggcctcttaattttattagggtagcccccatcagecatgtctggaaactggaagtggtcttcttcttgtctcc
tcttaacagttccctgtgaatggaagagaagagaggaggagaagagaggagaggagaagggaagagaggtgaca
cacacacacacacacacacacacacacacagagagagagagagagagacagagagaaagagagagagagagaga
gaggaatttttataaaggtttggcacattaaagctaatgaacaggaaatgtgcatgataaaacagacctctcag
tttaaagacttatagttgtgaaaactataaaatacagcctgtctttggaaccatagtgcttatttattcattat
tatgtttcatctaaactgtctaattacatttcaaataaggcattatgttgtctgtatactaaaacgggatagaa
cgttattcaaagggtaatctgcccacttcaaggagagttcaacaaaactatgcagaagtcactaaatgaaccat
gctgccaaaggcaggcattggagagaaaactagaagtagctaaatagttttaattctttcctgtctacagacac
atagattttaacgaaggaataccatagtatagaattgaacttttaggctgccttctagtcttggttaaatgcat
caggctgcagtggtaaaattgaatacaacagagcccttacaggaaagaagtagatctggatgtgttttcttggg
gagctgtttaaaatactgtttttgggaaagcacaagtttcagaacagtcattgtaggcatcgtattcattgttc
catttatttttacacacacacacacacacacacacacacacactctcacacattgctatgtgtacacaaaaata
atttggaagaacctatacccaacaatttggagtggtcatttatttgggatgactggcaattccctttctattct
cttcatttctgcttgtttgtctttaacgagaacgactcataatccaaaaatttaaaaaagtataaagttatcta
aataagaaattttcctctgaagatgcatcctcaggttggggagatattaaacaatgagaaaaggccccaatctg
ggatctgaaccttgggggagctgcccatcatttatagaagcacagcctttgggaacaaagcaaagtcactagca
atgtgagacttcctactcttcatggcttcatacagtcatccatcgctgttgtgttaatgaccatgacctgtatg
ttagcaggtaaatgggaaaggaagtgggggcaaaggagtatgtgcaggaatgatcaaaataaggaaaggaagag
agggatctggaaatcacctgaatgccgataggtgaacaggtagaattcttttaaagcttcccccacccggtacc
ccccaaataacccctttccagctttggaagtttcactaggacatacagtgetcatoctetgatgtcacettaag
tttggctcttctggtttgatgagcttgtagcccactaggagctcaaggcatgcatggggccacttgccagcacg
atgaggggcatgactgtcatggccaagtgaacatcaaagcagatccccagggctgtatgtctcaggccttggtg
cacatcagaatcacttagaaacatccacattcctgggccctcccaccacaaactgacagcttcatccagggtgt
ggcccaggcatcgggagtttttccaacagctccatggctgattctcaacagaaaaccactggcccagagcaagg
gtggaggcagcgtggcatagggctctgaccttggccttgccactgaacctctcagagccccagtttctttatgt
gtaaaatgagtgtaattatagttcttttctcatgaaggtgctctgactattaagtgaaacggggcacattgtat
gacacctaatagctcctcactaactggtacccggcattataaagggcaggtatggaagggttctgggagtccaa
tacccttcttaaagacagagaggtctctgagacccagagaggggcaggccttacccagagttgctcagccagag
ggcaacaaggcccaggtcagatgcagggcccctccaccaccactcagctgcctccagacccactgccttcgcca
tgttgttggtaggacactgcatcgcccccacagaaggggcttgccaacttgagtgagaggacttgcacacttct
ttgacttttcttttgagatgcccacaatctgaacaagggcacttcaagggacagctctgtcaccaaactcatct
gaggcctgaataccatgggtcaggcaggaatgggttggagaggtgtagagcaggcacaataagagggctgaggc
ccatgcagtcatcagtgcccactttcccaggagtctgactgggcacagcacccatagtgtccctgagctggtcc
atggagcagctcactaactgtttggcccacagcaggtgctcagtaaatggcagttgaacgaatcaatggacaaa
ggaacataaattacccaacacacagggagctcagccatttactcaatccattatggagtaacctacaaacaagc
cactgggtcccaaactgaaattgtgtctcttctacattctcccaaagaatccaataggttaaaaatagaaatgt
atgaaatagatcaatcagggatgattgcatgtggatttgacataaggatcccctgcagggagtctgagctggca
acagtcaggcccaaagtgctgtccatgatgtctcgaactgcaagacagttttaacaatggcgaagcaatgcaga
accaggcaggccaaggagggggtgggggttggggaaaggaagggagggaaggggctgtgaggggcaatggtctg
gcatccctgccacgtgagcctctgaaatttgctggcagcttctatgggctcccagagctttcacttaattgttg
gtctgccactaacctgctgggagtaaggtgcagggatggaggaggcagggcatgaccaccagacactaaaggta
ccagctggggccactggcaaagggaaggaggctgcacctctcctacatgagagcccgtatacacacaccttttc
cagcactcatcaactgcatcccaagcaaatggtccctgatcaattccaattctagaaaccaactgactactcaa
taacaaagtagatcccagcaggccgccactgctggagcggatgccacttttgctatgccaagtctgtggctgga
cagctgctggcatgtacactcactgactttcataaggatgcctaataaagggggcaggctcacctggcttttct
caggggtggggtttggggtgccgatagaggctgctgttttggcagagtggcaagctgcaagcctcttctgagct
ttcatttttcaatggacttcagtgagaattcactttgtcagaggccatgcagctccatgttttggatttcatgg
aatgagetttcaacagtgagectgaagtgccctggctgaacageaagaacaccagecaaccctaaacaaggceg
aggagaggcggctgtgtttacacggaaggctcagccttgctgtaatagcgtctgccttcaccagacatcagtga
ggcgtggaaatctattatccagttaattttgcccctagataaagacttgctttcgtgtcttctctttcacagtc
ccatgatctgttactcatctcaactgcgagaagttggctgggctttcccctgtgcccagtgccacactcgtgcc
ttcactgggtcacctgtgcctgtggctgatgccgctgaggttttgcctgcccagactgggtgtttctgactaaa
tcccacagccaccattttagatcaagggcaggagatagctcactgctccggaatgacctcccctcccagaatcc
tggtaggggcggaaggtccccaaccaagctcccagccctttctaaatgaatctccctgcttcacccatgtgctt
ttctccagtctctgcggtcttgatgacagcagggtattagtcctagctgtcccacagctcctacttctttcagg
cctctccctgtgacaatcagtagccactggcaggatttcctcagagcatatctcgatttgctttcagacaatta
gttaaaaggacactggaccccagacgtcccaactcccagccagagccctcacaggcccggcctttggtggtgag
gaagggggagggagtgagtgacagtgccctggcatcttttagaaacgaattcctttctctccatacataaatgc
ctgcagagtcccatttcagaatccggcagacaaagccaccaatgtgatccccatgaccttataaacattcatta
aaatgcatttcaaggcatgtgatggcctccccaccccctagataatgagaaaacaaaggtttctcttctgatag
agacaagttcagctctgaagtcaacattatttctggttctgtctgaacaatgacatatggcaactcttcccttt
ctatagttctagtccagaatgacaaaaaaggggaaaaatttcttagagaaggtagagattatacgaatacagtc
catgaaatgagcataaggagaataaagaatataacttatccaaagaagtctggcaggctgttataaatgcttga
ttttggacactgtagttggaggtttaacatggacaccaataaaaaggtcagcaaagggtatgcactgttcctat
tgggcaagaagataggaggtcaaaggtaaccaggaaagataaactcagggagacttattttccctccagagggc
actgggcttgtaggccctgggcaaaattgtcaaaaaggtgaaaatcgcctgtggtttatttagtctgctctttc
ttcactagtgcctcaccagttcagttcaggccaatttgctagaaggtagcgaacgatcgaccggtgaagttcct
atactttctagagaataggaacttcggaataggaacttctacetagatgcatgetcagagcggcccctagetag
cgtttaaaacctacagttgaagtcggaagtttacatacacttaagttggagtcattaaaactcgtttttcaact
actccacaaatttcttgttaacaaacaatagttttggcaagtcagttaggacatctactttgtgcatgacacaa
gtcatttttccaacaattgtttacagacagattatttcacttataattcactgtatcacaattccagtgggtca
gaagtgtacatacacgcgcttgactgtgcctttaagcttttaattaagagtaattcatacaaaaggactcgccc
ctgccttggggaatcccagggaccgtcgttaaactcccactaacgtagaacccagagatcgctgcgttcccgcc
ccctcaccegeeegetctegtcateactgaggtggagaagagcatgcgtgaggctccggtgcccgtcagtgggc
agagcgcacatcgcccacagtccccgagaagttggggggaggggtcggcaattgaaccggtgcctagagaaggt
ggcgcggggtaaactgggaaagtgatgtcgtgtactggctccgcctttttcccgagggtgggggagaaccgtat
ataagtgcagtagtcgccgtgaacgttctttttcgcaacgggtttgccgccagaacacaggtaagtgccgtgtg
tggttcccgcgggcctggcctctttacgggttatggcccttgcgtgccttgaattacttccacgcccctggctg
cagtacgtgattcttgatcccgagcttcgggttggaagtgggtgggagagttcgaggccttgcgcttaaggagc
cccttcgcctcgtgcttgagttgaggcctggcctgggcgctggggccgccgcgtgcgaatctggtggcaccttc
gcgcctgtctegetgctttcgataagtctctagecatttaaaatttttgatgacctgetgcgacgctttttttc
tggcaagatagtcttgtaaatgcgggccaagatctgcacactggtatttcggtttttggggccgcgggcggcga
cggggcccgtgcgtcccagcgcacatgttcggcgaggcggggcctgcgagcgcggccaccgagaatcggacggg
ggtagtctcaagctcgccggcctgctctggtgcctggcctcgcgccgccgtgtatcgccccgccctgggcggca
aggctggcccggtcggcaccagttgcgtgagcggaaagatggccgcttcccggccctgctgcagggagctcaaa
atggaggacgcggcgctcgggagagcgggcgggtgagtcacccacacaaaggaaaagggcctttccgtcctcag
ccgtcgcttcatgtgactccacggagtaccgggcgccgtccaggcacctcgattagttctcgagcttttggagt
acgtcgtctttaggttggggggaggggttttatgcgatggagtttccccacactgagtgggtggagactgaagt
taggccagcttggcacttgatgtaattctccttggaatttgccctttttgagtttggatcttggttcattctca
agcctcagacagtggttcaaagtttttttcttccatttcaggtgtcgtgagaattcgatatcccaccatggaca
aggattgtgaaatgaaacgcaccacactggacagccctttggggaagctggagctgtctggttgtgagcagggt
ctgcacgaaataaagctcctgggcaaggggacgtctgcagctgatgccgtggaggtcccagcccccgctgcggt
tctcggaggtccggagcccctgatgcagtgcacagcctggctgaatgcctatttccaccagcccgaggctatcg
aagagttccccgtgccagcgcttcaccatcccgttttccagcaagagtcgttcacgcgtcaggtgttatggaag
ctgcttaaggttgtgaaattcggagaagtgatttcttaccagcaattggccgccctggccggcaaccccaaagc
cgcgcgagcagtgggaggcgccatgagaggcaatcctgtcaagatcctcatcccgtgccacagagtggtctgca
gcagcggagccgtgggcaactactccggagggctagccgtgaaggaatggcttctggcccatgaaggccaccgg
ttggggaagccaggcttgggagggagctcaggtctggcaggggcctggctcaagggagcgggagctacctcggg
ctccccgcctgctggccgaaacctcgaggtgaaacagactttgaattttgaccttctcaagttggcgggagacg
tggagtccaacccagggcccatggtgagcaagggcgaggaggataacatggccatcatcaaggagttcatgcgc
ttcaaggtgcacatggagggctccgtgaacggccacgagttcgagatcgagggcgagggcgagggccgccccta
cgagggcacccagaccgccaagctgaaggtgaccaagggtggccccctgcccttcgcctgggacatcctgtccc
ctcagttcatgtacggctccaaggcctacgtgaagcaccccgccgacatccccgactacttgaagctgtccttc
cccgagggcttcaagtgggagcgcgtgatgaacttcgaggacggcggcgtggtgaccgtgacccaggactcctc
cctgcaggacggcgagttcatctacaaggtgaagctgcgcggcaccaacttcccctccgacggccccgtaatgc
agaagaagaccatgggctgggaggcctcctccgagcggatgtaccccgaggacggcgccctgaagggcgagatc
aagcagaggctgaagctgaaggacggcggccactacgacgctgaggtcaagaccacctacaaggccaagaagcc
cgtgcagctgcccggcgcctacaacgtcaacatcaagttggacatcacctcccacaacgaggactacaccatcg
tggaacagtacgaacgcgccgagggccgccactccaccggcggcatggacgagctgtacaagtaggcggccgct
cttcgagcagatatcataagatacattgatgagtttggacaaaccacaactagaatgcagtgaaaaaaatgctt
tatttgtgaaatttgtgatgctattgctttatttgtaaccattataagctgcaataaacaagttacgttaacaa
caacaattgcattcattttatgtttcaggttcagggggaggtgtgggaggttttttaaagcaagtaaaacctct
acaaatgtggtattaattaaagatctttaaacaatttaaaggcaatgctaccaaatactaagcgcgtgtatgta
cacttctgacccactgggaatgtgatgaaagaaataaaagctgaaatgaatcattctctctactattattctga
tatttcacattcttaaaataaagtggtgatcctaactgaccttaagacagggaatctttactcggattaaatgt
caggaattgtgaaaaagtgagtttaaatgtatttggctaaggtgtatgtaaacttccgacttcaactgtagttt
aaaacgggcccgtagtctagggccgccagtgtgatggagttcggcttcaggtacagcacactggcggccgttac
taggtagctagagccttcagactctagggaagttcctatactttctagagaataggaacttcggaataggaact
tcacccatggcgatcgctagcctctaactcctagaccgtcagaactgctgggcccttcaagacgggctgctcac
acccactcatgttaagcctggtgaggcctgtactctgttttcacaggaagaaatcctcacccagtcttccccaa
acacattcccaggttgtgtcattagtgggatagagatgattattgtggggagaagagaaacatctggatggatt
tggtgaggttgatctatagaggaagtaggtgctgcctgaggtagctgtaatagaagctaaaggtcaaaggagag
ggccctgtcccaatccagatgactccacttctgctggacccaggttcacaagcttaatctacatttcacctaaa
tttggctaacaagcccaaaatcacacaggcaaagggagaagtggaggcagaaccgaggttggaggccaccaggg
ccaccgggcagagatcatttaagcccaaccttctcacttctccctgggctctgcctctcttaaaggaccttgtg
gtgtgacctcttgtaggtccctttcacactcggggcctcagtttccccactgtaaagtgaatgggtcccagctt
tggtaagcttatgcttacctgatgctttcttcctgggctgctcttgtagagaaaagataaatcttcttcctcca
tccacgagggctcctttccctgggggtgagagtaggctgaggagagccacttgcacacacccttaaagaaagta
ttacctgcaccagctcagtgagaggcacagatcagactgttacttgaatcaaattatgagcctccccaaatata
tctatgacatttaaataggggattacttgaacatagactgtgggatccggtgtggagtgcgggagactagcaaa
gtgaatcctgagagtagcaggtctgcacctgttggatcgagaaaggcggcctacaattctggtcaaatgagctg
tgcttattgacatattctattagagagtactaccaggtcaccagtcaccagaaaggctgccagctctccaacca
cctccagggaactatcctgaatggggccttaacaagtctaagagagggttggtttgggtcccaagccaatattt
gctctgctttatgtcagtcatatggaacccaaaccaaccctctcctatgtgcctcaccagtcggtgcagggatc
ccaatttcaagtttggttttttatggtcaaagtccagcatagattaaatgaaggggtgtgatgatggtgttaaa
agagaactccagaccagtttaactcttggacacacatcccatctcaccatggtgcttccaaccttccagagatg
atgggctcctattttctgatgacaaagccctccacaggattgctgcctggccatcagggagtgcctctgtaact
gaggctgagatcccactttcagtcctccagctgtggcccatccctgctccgcccaccgggtatggcctgtccta
ggctcttaggtatggctgcattgtgaaatgatggctacagagctggcatctcctgtagtctggttcatctagtg
cactacctcatagttaaaagaaatctgtttaagccactgagggtggctcctagtgccaactccaagaacaggaa
gcttcccttttttgggaggaggggcagatggtaacatggatcgtccaggtcaatgggagcagggcaaccacagt
aagtactggacaacaacacaaaactccatgtgtggcttccatcgagtccctctccaattggtttggtcttctcc
gtcccatgcagcactttagcaaggggcctggctgaaggctatgaattgtgtggagcctcctcattgcagtctcc
aaccatctgatgctgggaaaatgtcaccaggatgcagccatgccgtgtggccaatgaaccgagaaaacacccct
tttctagaatgctctaaagaggcagaataatccagaggtgaggaaggaaatactccaccagagacccaggcagt
tcctacaaaagccagactttccttcacctagggagtgacaagaccagtggaaaacactctcaagcagtaacccc
caaatgctctgcaagccagtggcgtccagataccgcacaagcgagtgggctgtctaatcccatcatcatgatgt
aaatatctctaggctgccctgggctgtgcctgaccctgtcttcagctttccacacctccacctacagcccatgc
acagaaggaccacccaggaatgctgcaagtgtggcacctccagggccacccagggagaaggagggcagctatgc
tggtggctccaggcccatttggcgggtggtaccttcacaccacaaagcccaaactgaggccccagatttggctg
atgagggcatattggacaggggtcacttatgctcttccccattgccacctggcctctggctacctggacttggc
tacctgtggatcctctcacaggtgccaccatcttggctgagtctccagatgcgaggtccctgaggcagtggcgg
gcttctcgctaatgetgatgggattaggaatgggataggtggggagggccctggactgggccctgatgagecaa
gtgggtttttagaggggctactggtacatttcagggacaggacatctggtagagctaagctggggcaataagga
gccactgctaatctgagagctagaaacaatcagcttctgggtcattattaattagggtagtttgggctgtgtgg
aagtcacgtactatatggggtagccacagctctctctacagataatctctaagacttctgattgggactgtgtg
aatgcagtagcaatatctcttcttactgccaggccctgccagtcctgcctccacgccctggctggcccccctta
tgatctgacccatgccaggctgccatagtatgttacttctgcattagcactccttgggacctgcctctccactg
tccctcagactttaaagaactatacaaacccaaggggctcttcccaagagaattgatatgacttgaggtgattc
catttctggaagtagtcactccattttctgcctcactctttcagtgcttcacagagcaggttcgaacgaaggag
ccatccaactaaccgtcatgttcgggcaaccgaagaagggagtggcaggatttcctttggagacttctggaatt
agacagcagtttaatgcaagcatctaaattctctccctcccagagtctcattaaaactacagtaagagtttgtg
ttttgttttgtttttaaagacaaaatcccaccaggatagagagaataggagaggagataacagcatcataattt
atgaaactaaaatgcagatagaccaggattaactgactacacagcaccaaggaagctgaatcacaagacagcag
aggagaaaactggaaaggatcgtggtctatacggcagaatcttcccaagcctcaggaggaggagctctagatgt
tcccagatctgggaggtaaagtggaatggggggacatggtcagcgtaatggggttgggctggaagcaggttaag
gagcaggcagatctctgaatcccctctctgactctgtgtccccaggcatctgcctgtcccccaccctggaagag
gtctggcttgaccctttgtctggtgaatttcctgctctgctttcctggtcctgctggccggatcagtggaggcc
actcacttcaccccacagggatgttctgtgttgccctacacctgggaactggaggtactggaggcaggctgtgg
tgagcttgaaagcaaaacacagagggcagtccaatctctttggccatatttcttctgcatatccaataccatgt
ccacaactctgctagtgtcctgatggtggtgggctctacacattcccgggaagctgaaggcagataatgaccag
gacaggtcaacctctcttcttctgaaagccttcatctactaatggcctgggactcttcccttaaatgcttagat
tgtgtcttccactaaggttttttgctgttgctgttgtttgtttgtttgtttgtttgtttgtttgtttgttttga
gacggaatctcactctgtcgcccaggctggagtgtagtggcacaatctcagctcaccacaaccttcacctccta
ggttgaaggggttctcctgcctcagcctcctgtgtagctaggattacaggcacatgccaccatgcctggctaat
ttttgtatttttggtagagacaggatttcgccatgttggccaggctggtcttgaactcatgacctcaggtgate
tgcctaccttggtctcccaaagtgetgggattacaggtgtgagecaccacacccggccaaggtttttgtttgtt
tgtttgtttgtttgtttgttttgtattgaggcagggtatcactctggtcacccaggctggagtgcagtagtgca
atcacggctcactgaaacctccacctccctggcgggctcaggtgatcctgccacctcagcttcccaggtagctg
ggactacaggcttgtaccaccactcccagctaatttttgcgtttttagtagagacagggtttccccatgttgcc
caggttggtctcaaactctgggctcaagcgatctgcctgcctcagcctcccaaagtgetgggattacaggtgta
agccaccgtacccggccccgccactaaggttttgaaaatgaagcaattacaagtttaagtctattaataagtga
tgaagccatgtagaaaagcagaataattatcttggatcaggaaggtcacatgaggatctacttgggggttgtca
atattctatttcttgacctgatcagtgttgacagcaggttttaattttttacttctttttgtttgtttgttttt
gagacggagtcttgctctgtctcccaggctggagtgcagtggtatgatctcggctcactgcaacctccgcctcc
tgggttcaagctgttctcctgcctcagcctccccagtagctgggattacaggcaggcaccaccacgaccagcta
atttttgtatttttagtagagactgggtttcaccatcttggccaggctggtctcgaacttctgatctcgtgatc
cgccctccttggcctcccaaagtgetgggattacaggcttgagecagcgtgcccggcccattttttacttcctt
attaaactgtacatataggccttgcacacttttctgcatcaatgttatattccacaataaagggaaaaggtata
tacacaacttgataccagtaatgtgaaacatatatttctacatagaaaaaaaaatgactgaaatactgcactcc
aatgtgttcacacagtagttgtttctggattatttatatattaaatgtttatatattgtattatgccatgaggt
ttgtgttttctctccacttttctgcattttccaagtttactacaaagagcacatattactcttataatcagaaa
gtcataaaatatatttaaaaagacaaaattgaaactaataaggatcaacacaaaacagatgagccatctgtgga
aatccgcacagaatactacctaaagagattggtgacgtgcatgatctcactaggatgagcacaaagcttgccag
agcctagggtctatttctagggttggctcttggaagccaggatagttgttatctctgggaagagggaggggcac
acaaggggcttctaaaacattctgaatgttctatttctgaacctggttggtgggtacatgactgttggttttat
tattatatgttttatatactcttccgtatgtatggtgtggattccaaaaaaagatttcctttagagaaaaccag
aatcacataagtagaaaatatggtgctatgttgaaggaacaactcaagtttatataaaatcatcatcatttata
ggcttaaaaagttgctttggaattttggtctaactgacttgtcttttctgcagcaaaccacgctccttctggac
gtgetccaggcagaggggattagggtgggttcaaggctgcaagtacetagetcageacactctettcaggggac
ttagagtttgtctggtgttggctctctgagctcttgtcaggaatgccgacccttccgaggttcaggatttgaag
cctgccttcccaccccagatttggtccacacagacactcaagtatgtatttcaactacaaatgacctgtacttt
cctattactcctctctttcatggtaacctttctggtatccttccttccctacatttatgggagggggacatcat
tctctgctctcctgtcactgaaggctccaccttctgtcttcttctgacccatctggttttcctggggccacctc
ctctccttaccaccctaacgcttttgtaacttgaggagaaatgagagatcacctagtcaggtcatcattctctg
tagatgaagaggcccaatggtttgctcaagaattgccaagcgagttaaagacagagagtatgagagtcagcaag
acctacagaaagcatctatctgcactgttttgcagggacttagcctttgtgtgtggactcctggaatgccaccc
actaagaaacattgtctgacaccaactccccacttggtaggtggggacactgaaactcatggcaggaaagggcc
ttgccccaagccagggcagagtgtcactcatcactctcaattttcagtccagggcaccttgttgtgactatccc
aaaggcagccactttccctggtctgaaagacctgaagagagaagagaagagaaggatggaaggcagagtatgcg
gctttgattcatttcctggtgaaaacagatctatacgagaagcaaatttcacgaaagggaagagaagaaagtgt
cccatacgttgctggcctgtttcaaccttgctttgattcttgctgaaaagggtaccgtgtatttctgagttcaa
catgcagaccagtgttaggaaagccactgcacctccactttagcctccagggctgtgccctgcaaatggcctgc
agccttggtgcctcgctctccagactgcattttggaagatgggacagaggcttatggaagcccacattagaacg
ggggagcagaatgggtgagatgagggatccttgatagtgaaccagatgaaggaatggtagccaaatgccaggcc
tcctttgtggcttcaatccaaaggctctggagcccttccagggcagaacatcaggcatgtttacccccactgtc
ctcaacagtgacagaggtgcaatcttgggcagctggccattttgaaagcaacctccttaatctcaactgggaag
gctccctagcaggacccctgtgttgcacacctggaggaagctagactaaccagaagctcagcacggttccatct
gggatgcccaggtctgagacgaaaaaggtaactctcttttctgggtcctggcccagttgtgtctctctccacct
cattctctgagatgcctgtctccccttttttgtcccatcaggaggcaagagctatcactgggccagactccacc
agaagccaagccagcttgttacccagcttctcagggagcaaagaacagccttgtttctatcttatccccactgt
cccctgcccctgccccacctcccagccattcagcttctggcttccccagagctgcctgcttctttgtggtcctc
cattccttgaaaagaccttctagtcattagtgtatataaatggccacttagcccagattacagtgaggtcaaca
gctggggctctgagaattgtcacacactggcacaggagaggaggctattcttccagagaatttggagggcactc
ccatccacttacaacaaaaagcccatccactgtgcttggcagtaggtgatctgagaaccaatggaaccaggtta
atcctgtggcactgttgagtgaggagagcagtggcgggcactggaaaatatcagagacaaggcaggagacctga
aatctaggcttagctcctcatatacttggcagctgtatgacctcagacaaccagtgttacctctctaagcctca
gtttcctcatgcaaaaggagggggaataacaacagagcccactgcttgggggtgttgtgaggacaggatgaaaa
aacaaacagaaatccctcagtacaggattcagtgcagtggacagtcttgcaaggtctggttcagccctccaccc
ctaccctcaccagtataaagaactctggcctacaagtcagatgacctgagttttaatctcagctttgccattag
ccgtgtgaacttgagaaagtccctttcctttttacatctattgggatgatcatgcattttttgtcctttattct
gttaatatagtgtgttacattgattgcttttcatagactgaaccagccttgtattccagggataaatctcactt
ggtcatggtgtataatcctttatacaaatgttgctgggttgagtttgctagtattttgttgaagatttttatgt
cttgattcataaggaatattggtgtaccttccccttttatggccacagtttccctacaatgatgtagtcgaact
agacaacctccaatatctttcagtattcatgtcctctgattctgtgaaactaagaaaattaagaaatagtgatt
cataggcacaaggcaggcaaaacttagactccttgtagaataattaggaagccaaatattcagtgtgcttattt
ctcaaataaccttagtttctccagtctgccccaactccgaggcctgaatatctctagatgcttatgatggcaac
taaagcctaaaagctaattcattttaaagttcttccaaatgcatagggttttatttttccagacctgggttcag
atggggaatttgacaaacaatggaaagggggaaaaacaacaatctaaacactgagtgacaaagtaacaaagaaa
tagtctagctatcagccagtcaagccagccttggctttgctatccaaagtagtcagtctaattctaccaccagt
ttctgttcctgtagctgtctactgcctgccagggactctgccttcccacccacaactaccaatggaaggatgtg
gtgaccataccagtggctgctgacatctcctgccatgggaagcataattgcctccagcagcctcccccttagat
ccatcatttttgttgcacttggcctgggctgtactcccggccaatgactgaacatggtgagcatagtaatgcag
gcccatttctgtgaggagcaggactcctccagtaggtgactttggctcaaggactctctattggcctggttgaa
cttttcctgaactgtgctactgtctgagactcttcttacccaatcctctttctcgccccaattgtcacagacca
cctgcattgtggtctgagtctctccccaccttctcttgctcttccctgtttatctttcacaggcatttccccca
gtacattccttgaatgtctaacccgatacgggtgcctgacttttggcagacctaagcagacaaaaaggagtact
tggttacctagctcttctttctaccacaaacatcgagggaaccctttttccctcacccctctgccacaccccca
ctgccccagtgaacaaccacagagagagctgtggtataatattaggctggtgcaaaagtaattgcggtttttgc
cattacttttaatggtaaaaaccgcaattacttttgcacctacctagtatttgtgtccccccaaattcatatgt
tgaaacctaacccacaatatgatgtcattaggaggcaagaccttgaggaggtgattagatgatggggtggagct
ctcctgaatgagattagtgcccttataagaagaagcccaaggaagctaccttgactcttccatcacatgagaat
gcagcaagaaggcaccatctactaatcaggaagagagctctcaccagacactgaatctgccagtgtcttgatct
tgaagttcccagcctccagaactatgcataatgcatttccattgtctctaagccacccagcctatggtattttg
tcatagcagcctgaactgactaagacagtgagecacatgagaagtgccccaacccctcccttaagcacttggct
cacagatcagtgggttcatttctgcctgagttttattgttattctgtagatttcttgggctagatatatttttc
tgttattttccttcttcacctcagtcatgaattggttgttttaaaaaagacaatgtaagtcatggggaaactcc
tgacaactctactctcctagggttcctgataaaaggggattcagttgagtcctctgatggtctctacctgccaa
agtccagcagcccttagcaaacatgctgctcgtttctgtagagaaggtgctggtgtcccaccatacttctctct
ccctcatgaagggcttgcgacccagcaaatgggtggcttatatgggtctgtttcaaaggaagagccagctctgg
gaagaaaaaegatgagcataagcataacctaccactgtgcctgggaaagcagacaacttttttgatgtgtgaat
atctaatgagaatggaatccatcaattaccttaaacttaggcacagtcttcaaattcaatatatgtgggatata
cttttagtcagtttgtagacgttatttgtaataaataatctggcttctctaaagaaattattttaagtgtttgg
tttggtttgatttaatggtaaaattatatttagtggcagagaattatagcaatggtgataaactatagagtgtc
ataagttcatatcttattctcacatttgaagctgcctgcagatgcattcaagatgcagccagaagtcaggagac
tcaggctgttatttggagctcatcattttacagccttgctggactcccactttctcaggggaaaaatgtggtgt
tgacccagattagctctccaggccctgctgagttgggcactctgtaagctggagggtcttctattgtcttcacc
taagtgtcaatcaacaacccaaatgggcatgggggaagagggagctgggccaatgcccagggtgcctggtagag
agataccttgggcactggaaggcaccagcttcccagagagaagggggagggccatgaaaaagttggctgtagat
gccagggacactgggactctccagctgtgtgtttgtgtcttctgaagacttatgtttcattcctttggagcatg
cataatcatacactgtgggatgtgttatatagattgcttgatagttcaccactgtaataaaatactgtgactgg
aatetgetcccagtctgcctttgatagcacttgtgcaacacacatttactgagcatttacagtgatccaggacc
tgtgttgtgaaaacattgatggacaaggcagatggtggagcacgtcagtgaggatttttaacaaaggctggtaa
gtgctataaaggaacattgtaggacactagagaacaaagaacaggagaacctgacttaggctggggtggggcgt
tggttagaggaggctccttggaggacatgaggtttaagctgtgacctgaggatgaatagatgttggccaggtga
ggtaccggtatttgtcagccttaccagtaaaaaagaaaacctattaaaaaaaaaatacacatacaaagcctcat
cagccatggcttaccagagaaagtacagcgggcacacaaaccacaagctctaaagtcactctccaacctctcca
caatatatatacacaagccctaaactgacgtaatgggactaaagtgtaaaaaatcccgccaaacccaacacaca
ccccgaaactgcgtcaccagggaaaagtacagtttcacttccgcaatcccaacaagcgtcacttcctctttctc
acggtacgtcacatcccattaacttacaacgtcattttcccacggccgcgccgccccttttaaccgttaacccc
acagccaatcaccacacggcccacactttttaaaatcacctcatttacatattggcaccattccatctataagg
tatattattgatgatg (SEQ ID NO: 191)
Exemplary HDAd35 donor vector (HDAd35-T4-Ef1a-SB100-Flpe)
(Ad35 5′end: 1→481; pgk: 14103→14614; SB100: 14763→15785; BGH pA:
15811→16128; beta globin pA (Complementary): 16088→16376; Flpe
(Complementary): 16488→17759; EF1a (Complementary): 17780→18895; and Ad35
3′end: 29751→30158):
catcatcaataatataccttatagatggaatggtgccaatatgtaaatgaggtgattttaaaaagtgtgggccg
tgtggtgattggctgtggggttaacggttaaaaggggcggcgcggccgtgggaaaatgacgttttatgggggtg
gagtttttttgcaagttgtcgcgggaaatgttacgcataaaaaggcttcttttctcacggaactacttagtttt
cccacggtatttaacaggaaatgaggtagttttgaccggatgcaagtgaaaattgctgattttcgcgcgaaaac
tgaatgaggaagtgtttttctgaataatgtggtatttatggcagggtggagtatttgttcagggccaggtagac
tttgaccoattacgtggaggtttcgattaccgtgttttttacctgaatttccgcgtaccgtgtcaaagtcttot
gtttttacgtaggtgtcagctgatcgctagggtatttaccggtattcaaggattacatgagcttagaaatgtaa
ttagcatagtgtgtggcatagtgtagataccaaataaatatgatctctccttctactcttgaaaatgcaaacac
attcttggtggtcctaaaatagcctgtaacatggtttactcagcagcatttgctattcaaggcagatctgcctt
tagtcattggctgcgctcctgaacagctgtgtgaaaggctaacttttgtaaaccaaatcaaaataaaatgcagc
aaaaatttgtcactgaaaggaaatcctcagtatatccttttatgaaatgaaagatccctcatccaaacttaact
tttttaaaagtgcgcatttggagatatagccctttcttatgaatcctaattcaattttggccataaacacacgt
tgatgttccccaccccaaagcacatagcaacaagagtaggttctatattgaaaataatgacaatttaaaaacat
gtacttatttcactgtatgtggacagtgtctatgattgcatcatgaagtgtcatataaccatgtacgtgtacat
gagagagagatagagagagaagtggtagggtggtggtggtagaggggatggcgatagtaatcatggtaatggta
gaggtgatggaggtggtaatgacggaggtaagggtggtagtgatgatggtggtggtggtaatggtggtggatgt
ggtggtggcaattgggatggtgggatggtggtagccatggtgatggtggtaatggtgttgatttaaagggtggt
ggtagtgaaggtgagggtagtggtggtggaggtggtggtgctggtagcaatagtgatggtggtgatggtgttga
tgagggtgttgggatcagggtgagttcccacagtatatttcattcttgttgtaccactctgtcaacagcaccac
tgactgggacagaggaagaaggcacactctgaatgtgttattaacagaaacctcaaaacagtctgtctccttgt
agtcattcaaaattatctttttcttacctggaaaactgaaactgaattaccgggaaaaacacaggagatttttg
tttgttaatatgctgccaataaagtaattttatgtcaaatttaactacaggaaagggcaaggcattttctaagt
tccttagatgtcatgtggctaaaaaaaacaaaaggatggacageagttagatactgtacacttagctgtttgaa
gccatatattcagaaagcagatgttgggagttggtgtttgaggactgatttcctggaggtattttatataggcc
aagttcattgttctaaactctaagggcttgacttgagggaggaaaagaggcaagaacatgtttagttttgctga
cagcatcacatgggcagccctaaggctagacaactttagggcctgaagcttattctaggaaagaagcacctaca
gagtggcactgggctcccctccactatagagatgaagtcatatgacagtaaagggcaggcagggctgcctaggg
ggcccagaactgacacttccattagaatgagcacaggccagggagagaagtggggaaccagagagaaggagctg
gaattctagtaggacaaacggtaagtgaacaacaagaacaagttaagagtgtgtgcagtattctttcaaagact
gaaaaaatagtgatgtgatagaatggcaggtggctctgagcaggccaggagaaggactgggggcagagcatccc
aggcaggagggcagcaagtgggaaggccctggggtggggcttttggactgttccagtgacgggcaggcagccag
tgtgcctgtcacacaatgcaccagggaagtagtcgtgaatttgcagagggtcttgcaggctatgggaaagggat
tggattgtattttgtttgtagggaagccatcgggggacttaagcagaggaaggattggcttcatctctttgaaa
aagttctctctggatgetgatgggaggagaaatggaaggaaaagaaacacttttaggggcaagaacttttgaga
agggtggaattgggagtgtggagttggggccagctttggcacaggaggggaagctaaacacgtggccgcatgag
ggcctgtaattctacctgaaatgggtaccatttgttagggtaaacaaatgaaccaaatgcccagtgatacagac
caagtgttggcaaacttcttctgtgatggcccaggtagtaaatgtctcaggcttcgcaggccatgtggtctctg
ttgaagctctgtgtagtagacaatatgttaatgactgggcgtgactgtgtgctaataaaagtttatttacaaaa
acageeegtgggetggatttagetcacaggctgtagtttgccaacctctgacctagagcatgaactgagcatct
tcttggagggaaataagttctttccaagttgccctcctcacattgcagggggccatgtaggcccattattcaca
gaagagtgggtgggcaacctttctggagcagaaaaacgtaaagatttcttccgtagtgcaagtaaggtgaccat
ttctaaaccgtgcaagtgatccagcagtcccaaaagttgtttcacttctcattgtgcgcccgttctcaggtgct
ccgaagcttccagtcctttgtagggacatggatgaaattggaaatcatcattctcagtaaactatcgcaagaac
aaaaaaccaaacaccgcatattctcactcataggtgggaattgaacaatgagatcacatggacacgggaagggg
aacatcacattctggggactgttgtggggtggggggaggggggagggatagcattgggagatatacctaatgct
agatgacaagttagtgggtgcagcgcaccagtgtggcacatgtatacatatgtaactaacctgcacaatgtgca
catgtaccctaaaacttaaagtataataataaaagaaaaaaaaaaagagaggagagaaacatcatcccctccag
gatacccttgggccttgttcttatagtcttgtacattgttgaacaatttgcatgggctagtggattaaagcaca
ccctccaccctcaggccctcaagggtctctatgataatacagtctcaccttctaccctttccatcaccatccta
ggtgctatggccaaccttgaggctgccatgttaggtctatgcatttcccacctccaccacataactctctgaag
gccaggtagtttcctattcatcttggtaaccccaaagcctcgtgacagggctcagctggcatctgcggatgtga
atgaaccattggagaaaatggtactctgcaaataactctgttattttcccatttcctgtgtaaggcctagagac
aatgactttttaattgcaccccttcccctctgtatgacactggccttctcttgtgtccagcaatgtgggtggcc
tagatgatttctaagggacttctggccaagatgaacagcagctgcatcttactgagcatttactatgtgccata
tactcagecacagetctaggggcatagaagcaggagctctcagggtcagggcagtgagtgageaagcgageace
tatgccagccctgcctctggatggggacttgagagggtgatggaagcctgcagcactggagggaggcagacaaa
gacaggcctgtgetgagggggcceggageaagagagagggaggcaatgacagcagagacatgcetgcgccttgg
gtttgagtgcccagtggtcaaatccacttccctgtggctgatgcttgcctttctaactttggaatttaggggtt
ggagatctggtgagaaggtaggagggagatgaggaggagaagggaaaggcaggaaggaaggggagggaaaggaa
aagcaaaaggggaggaggaaggtttccaacaaattattctatatcaactgcggaaatcaaaatttgttgcccaa
atcttagaagctcatgtccctcctccccagaagtctggaatgcagcactccaggggtagcttataacccaaata
tctatctgtaaaaagagaaacattgggctttcgagctgtggattctcagtaaaagcaagaggcctcagcctaca
caggccagcccagagtttgaggaaccccaggcccacacccacagggctggcccctgggtctgcatactccctag
aaatgtgcacacttctgagcctcaactctgtcctggagtctaacagcatccctctccttcctggggcagttcca
cctccagaaacctgttaccttgggccttatgtcaaggaaactgtgggaaagagctaggcaggaatgcagatgag
gccagcatgggctcctaaaagtttagaaataggcagtgtcatgctcccaggtgcctgcataaaccagctgaaaa
atggagctcccctcaccagcactctcccttcaaacagactgtgatttgcaggtcactggtttaccaagccaggc
tacccaggcaggacccagatgccaagcccagtggtgtcctgcaagctgagcagtgctcagttcttgcaaaaaaa
ggtctgtgtgaaggcaaggcctctgcctggcttctcaccccagttgggtgtctggaacaggaaggagcccttac
tgcagaaaaaggaggagggagcaaagggagcgaacagctgcgtgctccatggggaggatccccaaagtagaaag
gcgcatacacactgcagcccttgacccagaatgctcacagctacattacagattcaggtctcctcagtgtagtg
gggctgctgatgagactgtggcatcctcaggggtcaggacacacattttccatcactcttctgatggcaaaaaa
cctctgagccaatgccaacctctgatcattaaaaaaaagtgctcacagcagtgtgtggtttaggatcatgccct
gtgtggtttggaacacgtgcacaaccacaccttgttcatcaccatcccagaaaccctgacgcaggcaaagagca
gagttattaaccctactttactgatgtggatactgaggcccagaggctcatgcaagttatcaataagtggcagg
gacagttgcctctagattaactagcccctaggatcacctgggtcttggaaggggacccataaacatgagctccc
ctctettggggccagatttgcacctgtgccgcgccttcagectgcatgaagtaggggctgetggcaaagactea
aagctgtaaatctgggttttctcttgaggcttctaagggagctgtttcgacaactcactctgttcccagctggc
tgcccctgcatagggttttaaagcagcctagctttctgccaggcttggcagtggacaacgctggtcagaacatc
ccagagagctaccagaatgaagtaagtttgcttctactctttacctgtttatgggctgtctctgccactggaat
gaaaggcactgagaacagtgcctggcctgcagaaggccctggaaatacctgagctcctaatctgggaataggag
taggaagagctttggaggcagggcacctgagtttgagatctacaacttcctgcctgtgtgacattgggaaagtc
tccatcctttctgagcctcagtctccaccctggggaagtggaaatatcaatctctgtgacacagaagcaaatga
gcgaatgtgcacaaagtaccttgcacaagagagacgctcaaacacttgcctccaggtttcaccgagaactacag
agtaagatagatttgttcccagtggaggaagcctgggaataatttgcccctagactatgaattcctggggctca
agatcgagcacagggccaggcacacagaagggaccctggaaatgtggcaggaggccagagatagacaggccctt
agagctcatacccatgccctctgacctcaagaagaaagaaacctgctcaaaatctcacaaagagcttgttccaa
ccctgaatcgagtctgaggactccttcctgagtccagcactttttctgcaagaagtatatgcctccaaagctga
tgggcgcaaatcttgaaccccgtcacataaacacaaagggaggaggtgactagagctcctcctactggatatgt
ctaaggtcaccagtctaaagaaaagggatggatagaatgaggccagtatttttgcagccatccaaatgtccaca
tacgctgttacactgagggctcctctctcccccgtcttcagccctacttgcatttagaggtgagaaagatatgg
gctgaggggttgtttttcatcgtattgtagatggaaagcacactgcccttggggccatccaaatgtggaccttg
atgtagcaccccaccttctggatggccatccttctgaaagtcactgaatttctcagactttattctctttatcc
ataaagaaggagaataataataatccccccaccctgcccaaccactgactggttgggaagctcagaagaaatac
tgggcacggcatcccattgtaatctatagagtgagtcgcttcttaatattaaatggctgaacacagaagatgtg
caaaaagtactgtgtccccttcctcctccaactgaacatttcatgccctttgcaccctcattttgtctaggagc
tgccttatgaagggaataggtacctgctccgagctggaggaatctttgccacttatggtggggtatggactgag
acagagatggcatgtgacatgcgcactgagtctcaactccatgcaggctctggagcactctcaaattggagtac
taatgccttttaaattctcacactagcaatcctttgacctactgatctagggatctagggaaagaatcgtgate
ttaacttcaaagggaaggacaaaatgttctgcctcctgttaaaactccatacactaagtgcagagactggatgc
cttattaaccttgggtagatgcccaaatgttcaaaaggtcaaactcttctgttccccagatcgccagagtcatt
aaccagtcacactattaaatgaatgaacagatgctgaaaaggtacttgcattactgagatttcttatggtgatg
gcccctgcctgatatgtattcagcattttgtagttttcaatgtgcattagagtatagtggtgatgacattggcc
tctgagtttgccacttcttatatctgtgactttggtcaaattgcttaatctctctgagtctcggtttcctggag
ataataatagcttcttcttcccagggttatcatgaggattacaggagataatgccccaaaaatgcttagtaaag
tgcctagcacctagtcaatgctgaattaaaggtggttattcttacttttcgttcatttgaactttgttctcagg
gagggcaaaggatagacaaagccccatagctagtgaggagtagctgcaagactagaacccaggtgttctgagcc
ctagtcttaggccaagaacaactgttacgtgagatgcacgttttccttcaagggagctcacaattatttccatg
taaattcaaggactgctaaaagagaactctcctctgggactgatatcattttatttcaagattgatttgaaaca
tgttttttgtttgtttgtttgttttctaggaaagaacaagagaaccagttaagctgaatgcctgaagcaaatcc
ctgttagcgatgttttcaggatgagggagagtggtgcaagaaacgtgcttccagatgcacatggtttcctggga
ctagggttcagggtgtcatccctgggtgttattaagtgtcagaaggagagcaaacaagggaaacatctgagatc
cagctaaggctacaccctggaaatgcaagcccagctcttgcaaaggacctcctttggccactcaccttccaggc
cttacaataacttgtttggactgcaggtttcttggtggactcacaggccattctgcttttatttggtcaacctc
agttcacaagcacccagatgctgagatcctcagcatgtgcagcagagtttcatattagcactgggtacctttct
gaggctacagggataccgtacagcagcacctgtcacgtccagccaaaggagtgggctctctcaatgtcatccaa
tgctgtttcaactgtgaagaagaccatctgagagagttgcttttggaggctgaggcaaatttttaaaattcttt
gttctcctcaactggggtgaattcttggtcttctaggacagcttgaagttttagaaagagtcaagccactcaga
accaacagagaactctttcagagaacaaggtgtggcatagaggaggcagagggctgatcttgatcaaatccaaa
gtgtgactctaaagcaatgaatgtgaatttttggcaaagcttacaaagggctctaaaggccatctgcaaagaga
agccaagcctgatcgatgaatcactagtgcggccggatatcgatcggcacgctgttgattttctcatagtaagg
aacagtgggccctttcagtcccacttctgtagtctgtggtactacaaatggtgagcccatgatgttgccattca
tagggttattctccagcagtaatgactggccagccactcccatagccgcggggctaggatttattgtcaatgga
gggacctgcagttctgcacaagcagtactaggatgagcacctgggcccattgcaagggtgacatcttcaaggca
aggcctcttaattttattagggtagcccccatcagecatgtctggaaactggaagtggtcttcttcttgtctcc
tcttaacagttccctgtgaatggaagagaagagaggaggagaagagaggagaggagaagggaagagaggtgaca
cacacacacacacacacacacacacacacagagagagagagagagagacagagagaaagagagagagagagaga
gaggaatttttataaaggtttggcacattaaagctaatgaacaggaaatgtgcatgataaaacagacctctcag
tttaaagacttatagttgtgaaaactataaaatacagcctgtctttggaaccatagtgcttatttattcattat
tatgtttcatctaaactgtctaattacatttcaaataaggcattatgttgtctgtatactaaaacgggatagaa
cgttattcaaagggtaatctgcccacttcaaggagagttcaacaaaactatgcagaagtcactaaatgaaccat
gctgccaaaggcaggcattggagagaaaactagaagtagctaaatagttttaattctttcctgtctacagacac
atagattttaacgaaggaataccatagtatagaattgaacttttaggctgccttctagtcttggttaaatgcat
caggctgcagtggtaaaattgaatacaacagagcccttacaggaaagaagtagatctggatgtgttttcttggg
gagctgtttaaaatactgtttttgggaaagcacaagtttcagaacagtcattgtaggcatcgtattcattgttc
catttatttttacacacacacacacacacacacacacacacactctcacacattgctatgtgtacacaaaaata
atttggaagaacctatacccaacaatttggagtggtcatttatttgggatgactggcaattccctttctattct
cttcatttctgcttgtttgtctttaacgagaacgactcataatccaaaaatttaaaaaagtataaagttatcta
aataagaaattttcctctgaagatgcatcctcaggttggggagatattaaacaatgagaaaaggccccaatctg
ggatctgaaccttgggggagctgcccatcatttatagaagcacagcctttgggaacaaagcaaagtcactagca
atgtgagacttcctactcttcatggcttcatacagtcatccatcgctgttgtgttaatgaccatgacctgtatg
ttagcaggtaaatgggaaaggaagtgggggcaaaggagtatgtgcaggaatgatcaaaataaggaaaggaagag
agggatctggaaatcacctgaatgccgataggtgaacaggtagaattcttttaaagcttcccccacccggtacc
ccccaaataacccctttccagctttggaagtttcactaggacatacagtgetcatoctetgatgtcacettaag
tttggctcttctggtttgatgagcttgtagcccactaggagctcaaggcatgcatggggccacttgccagcacg
atgaggggcatgactgtcatggccaagtgaacatcaaagcagatccccagggctgtatgtctcaggccttggtg
cacatcagaatcacttagaaacatccacattcctgggccctcccaccacaaactgacagcttcatccagggtgt
ggcccaggcatcgggagtttttccaacagctccatggctgattctcaacagaaaaccactggcccagagcaagg
gtggaggcagcgtggcatagggctctgaccttggccttgccactgaacctctcagagccccagtttctttatgt
gtaaaatgagtgtaattatagttcttttctcatgaaggtgctctgactattaagtgaaacggggcacattgtat
gacacctaatagctcctcactaactggtacccggcattataaagggcaggtatggaagggttctgggagtccaa
tacccttcttaaagacagagaggtctctgagacccagagaggggcaggccttacccagagttgctcagccagag
ggcaacaaggcccaggtcagatgcagggcccctccaccaccactcagctgcctccagacccactgccttcgcca
tgttgttggtaggacactgcatcgcccccacagaaggggcttgccaacttgagtgagaggacttgcacacttct
ttgacttttcttttgagatgcccacaatctgaacaagggcacttcaagggacagctctgtcaccaaactcatct
gaggcctgaataccatgggtcaggcaggaatgggttggagaggtgtagagcaggcacaataagagggctgaggc
ccatgcagtcatcagtgcccactttcccaggagtctgactgggcacagcacccatagtgtccctgagctggtcc
atggagcagctcactaactgtttggcccacagcaggtgctcagtaaatggcagttgaacgaatcaatggacaaa
ggaacataaattacccaacacacagggagctcagccatttactcaatccattatggagtaacctacaaacaagc
cactgggtcccaaactgaaattgtgtctcttctacattctcccaaagaatccaataggttaaaaatagaaatgt
atgaaatagatcaatcagggatgattgcatgtggatttgacataaggatcccctgcagggagtctgagctggca
acagtcaggcccaaagtgctgtccatgatgtctcgaactgcaagacagttttaacaatggcgaagcaatgcaga
accaggcaggccaaggagggggtgggggttggggaaaggaagggagggaaggggctgtgaggggcaatggtctg
gcatccctgccacgtgagcctctgaaatttgctggcagcttctatgggctcccagagctttcacttaattgttg
gtctgccactaacctgctgggagtaaggtgcagggatggaggaggcagggcatgaccaccagacactaaaggta
ccagctggggccactggcaaagggaaggaggctgcacctctcctacatgagagcccgtatacacacaccttttc
cagcactcatcaactgcatcccaagcaaatggtccctgatcaattccaattctagaaaccaactgactactcaa
taacaaagtagatcccagcaggccgccactgctggagcggatgccacttttgctatgccaagtctgtggctgga
cagctgctggcatgtacactcactgactttcataaggatgcctaataaagggggcaggctcacctggcttttct
caggggtggggtttggggtgccgatagaggctgctgttttggcagagtggcaagctgcaagcctcttctgagct
ttcatttttcaatggacttcagtgagaattcactttgtcagaggccatgcagctccatgttttggatttcatgg
aatgagetttcaacagtgagectgaagtgccctggctgaacageaagaacaccagecaaccctaaacaaggceg
aggagaggcggctgtgtttacacggaaggctcagccttgctgtaatagcgtctgccttcaccagacatcagtga
ggcgtggaaatctattatccagttaattttgcccctagataaagacttgctttcgtgtcttctctttcacagtc
ccatgatctgttactcatctcaactgcgagaagttggctgggctttcccctgtgcccagtgccacactcgtgcc
ttcactgggtcacctgtgcctgtggctgatgccgctgaggttttgcctgcccagactgggtgtttctgactaaa
tcccacagccaccattttagatcaagggcaggagatagctcactgctccggaatgacctcccctcccagaatcc
tggtaggggcggaaggtccccaaccaagctcccagccctttctaaatgaatctccctgcttcacccatgtgctt
ttctccagtctctgcggtcttgatgacagcagggtattagtcctagctgtcccacagctcctacttctttcagg
cctctccctgtgacaatcagtagccactggcaggatttcctcagagcatatctcgatttgctttcagacaatta
gttaaaaggacactggaccccagacgtcccaactcccagccagagccctcacaggcccggcctttggtggtgag
gaagggggagggagtgagtgacagtgccctggcatcttttagaaacgaattcctttctctccatacataaatgc
ctgcagagtcccatttcagaatccggcagacaaagccaccaatgtgatccccatgaccttataaacattcatta
aaatgcatttcaaggcatgtgatggcctccccaccccctagataatgagaaaacaaaggtttctcttctgatag
agacaagttcagctctgaagtcaacattatttctggttctgtctgaacaatgacatatggcaactcttcccttt
ctatagttctagtccagaatgacaaaaaaggggaaaaatttcttagagaaggtagagattatacgaatacagtc
catgaaatgagcataaggagaataaagaatataacttatccaaagaagtctggcaggctgttataaatgcttga
ttttggacactgtagttggaggtttaacatggacaccaataaaaaggtcagcaaagggtatgcactgttcctat
tgggcaagaagataggaggtcaaaggtaaccaggaaagataaactcagggagacttattttccctccagagggc
actgggcttgtaggccctgggcaaaattgtcaaaaaggtgaaaatcgcctgtggtttatttagtctgctctttc
ttcactagtgcctcaccagttcagttcaggccaatttgetaggaattctaccgggtaggggaggcgctttceca
aggcagtctggagcatgcgctttagcagccccgctgggcacttggcgctacacaagtggcctctggcctcgcac
acattccacatccaccggtaggcgccaaccggctccgttctttggtggccccttcgcgccaccttctactcctc
ccctagtcaggaagttcccccccgccccgcagctcgcgtcgtgcaggacgtgacaaatggaagtagcacgtctc
actagtctcgtgcagatggacagcaccgctgagcaatggaagcgggtaggcctttggggcagcggccaatagca
gctttgctccttcgctttctgggctcagaggctgggaaggggtgggtccgggggcgggctcaggggcgggctca
ggggcggggcgggcgcccgaaggtcctccggaggcccggcattctgcacgcttcaaaagcgcacgtctgccgcg
ctgttctcctcttcctcatctccgggcctttcgaccgttgatccggtggtggtgcaaatcaaagaactgctcct
cagtggatgttgcctttacttctaggcctgtacggaagtgttacttctgctctaaaagctgcggaattgtaccc
gcggaattaatacgactcactatagggactagtaccatgggaaaatcaaaagaaatcagccaagacctcagaaa
aagaattgtagacctccacaagtctggttcatccttgggagcaatttccaaacgcctggcggtaccacgttcat
ctgtacaaacaatagtacgcaagtataaacaccatgggaccacgcagccgtcataccgctcaggaaggagacgc
gttctgtctcctagagatgaacgtactttggtgcgaaaagtgcaaatcaatcccagaacaacagcaaaggacct
tgtgaagatgctggaggaaacaggtacaaaagtatctatatccacagtaaaacgagtcctatatcgacataacc
tgaaaggccactcagcaaggaagaagccactgctccaaaaccgacataagaaagccagactacggtttgcaact
gcacatggggacaaagatcgtactttttggagaaatgtcctctggtctgatgaaacaaaaatagaactgtttgg
ccataatgaccatcgttatgtttggaggaagaagggggaggcttgcaagccgaagaacaccatcccaaccgtga
agcacgggggtggcagcatcatgttgtgggggtgctttgctgcaggagggactggtgcacttcacaaaatagat
ggcatcatggacgcggtgcagtatgtggatatattgaagcaacatctcaagacatcagtcaggaagttaaagct
tggtcgcaaatgggtcttccaacacgacaatgaccccaagcatacttccaaagttgtggcaaaatggcttaagg
acaacaaagtcaaggtattggagtggccatcacaaagccctgacctcaatcctatagaaaatttgtgggcagaa
ctgaaaaagcgtgtgcgagcaaggaggcctacaaacctgactcagttacaccagctctgtcaggaggaatgggc
caaaattcacccaaattattgtgggaagcttgtggaaggctacccgaaacgtttgacccaagttaaacaattta
aaggcaatgetaccaaatactaggggccctaaccgcggggatcaacgcctagagctcgctgatcagectcgact
gtgccttctagttgccagccatctgttgtttgcccctcccccgtgccttccttgaccctggaaggtgccactcc
cactgtcctttcctaataaaatgaggaaattgcatcgcattgtctgagtaggtgtcattctattctggggggtg
gggtggggcaggacagcaagggggaggattgggaagacaatagcaggcatgctggggatgcggtgggctctatg
gcttctgaggcggaaagaaccagctgggggttacctactttctttatgttttaaatgcactgacctcccacatt
ccctttttagtaaaatattcagaaataatttaaatacatcattgcaatgaaaataaatgttttttattaggcag
aatccagatgctcaaggcccttcataatatcccccagtttagtagttggacttagggaacaaaggaacctttaa
tagaaattggacagcaagaaagcgagattagatccctattatttttgacaccagacaagttggtaatggtagcg
accggcgctcagttggaattcgctagccgcacatacagctcactgttcacgtcgcacctatatctgcgtgttgc
ctgtatatatatatacatgagaagaacggcatagtgcgtgtttatgcttaaatgcgtacttatatgcgtctatt
tatgtaggatgaaaggtagtctagtacctcctgtgatattatcccattccatgcggggtatcgtatgcttcctt
cagcactaccctttagctgttctatatgctgccactcctcaattggattagtctcatccttcaatgctatcatt
tcctttgatattggatcatatgcatagtaccgagaaactagtgcgaagtagtgatcaggtattgctgttatctg
atgagtatacgttgtcctggccacggcagaagcacgcttatcgctccaatttcccacaacattagtcaactccg
ttaggcccttcattgacagaaatgaggtcatcaaatgtcttccaatgtgagattttgggccattctttatagca
aagattggataaggcgcatttttcttcaaagccttgttgtacgatctgactaagttatcttttaataattggta
ttcctgtttgttgcttgaagaattgccggtcctatttactcgttttaggactggttcagaattcctcaaaaatt
catccaaatatacaagtggatcgatcctaccccttgcgctaaagaagtatatgtgcctactaacgcttgtcttt
gtctctgtcactaaacactggattattactcccagatacttattttggactaatttaaatgatttcggatcaac
gttcttaatatcgctgaatcttccacaattgatgaaagtagctaggaagaggaattggtataaagtttttgttt
ttgtaaatctcgaggtatactcaaacgaatttagtattttctcagtgatctcccagatgctttcaccctcactt
agaagtgctttaagcatttttttactgtggctatttcccttatctgcttcttccgatgattcgaactgtaattg
caaactacttacaatatcagtgatatcagattgatgtttttgtccattgtaaggaataattgtaaattcccaag
caggaattaatttctttaatgaggcttccagaattgttgctttttgcgtcttgtatttaaactggagtgatttg
ttgacaatatcgaaactcagcgaattgcttatgatagtattatagctcatgaatgtggctctcttgattgctgt
tccgttatgagtaatcatccaacataaataggttagttcagcagcacatgatgctattttttcccctgaaggtc
tttcaaacctttccacaaactgacgaaccaggaccttaggtggtgttttacataatatatcaaattgtggcatg
gtggaagcttggcatgggaattcctcacgacacctgaaatggaagaaaaaaactttgaaccactgtctgaggct
tgagaatgaaccaagatccaaactcaaaaagggcaaattccaaggagaattacatcaagtgccaagctggccta
acttcagtctccacccactcagtgtggggaaactccatcgcataaaacccctccccccaacctaaagacgacgt
actccaaaagctcgagaactaatcgaggtgcctggacggcgcccggtactccgtggagtcacatgaagcgacgg
ctgaggacggaaaggcccttttcctttgtgtgggtgactcacccgcccgctctcccgagcgccgcgtcctccat
tttgagctccctgcagcagggccgggaagcggccatctttccgctcacgcaactggtgccgaccgggccagcct
tgccgcccagggcggggcgatacacggcggcgcgaggccaggcaccagagcaggccggccagettgagactacc
cccgtccgattctcggtggccgcgctcgcaggccccgcctcgccgaacatgtgcgctgggacgcacgggccccg
tcgccgcccgcggccccaaaaaccgaaataccagtgtgcagatcttggcccgcatttacaagactatcttgcca
gaaaaaaagcgtcgcagcaggtcatcaaaaattttaaatggctagagacttatcgaaagcagcgagacaggcgc
gaaggtgccaccagattcgcacgcggcggccccagcgcccaggccaggcctcaactcaagcacgaggcgaaggg
gctccttaagcgcaaggcctcgaactctcccacccacttccaacccgaagctcgggatcaagaatcacgtactg
cagccaggggcgtggaagtaattcaaggcacgcaagggccataacccgtaaagaggccaggcccgcgggaacca
cacacggcacttacctgtgttctggcggcaaacccgttgcgaaaaagaacgttcacggcgactactgcacttat
atacggttctcccccaccctcgggaaaaaggcggagccagtacacgacatcactttcccagtttaccccgcgcc
accttctctaggcaccggttcaattctagtatcgataaataggggattacttgaacatagactgtgggatccgg
tgtggagtgcgggagactagcaaagtgaatcctgagagtagcaggtctgcacctgttggatcgagaaaggcggc
ctacaattctggtcaaatgagctgtgcttattgacatattctattagagagtactaccaggtcaccagtcacca
gaaaggctgccagctctccaaccacctccagggaactatcctgaatggggccttaacaagtctaagagagggtt
ggtttgggtcccaagccaatatttgctctgctttatgtcagtcatatggaacccaaaccaaccctctcctatgt
gcctcaccagtcggtgcagggatcccaatttcaagtttggttttttatggtcaaagtccagcatagattaaatg
aaggggtgtgatgatggtgttaaaagagaactccagaccagtttaactcttggacacacatcccatctcaccat
ggtgcttccaaccttccagagatgatgggctcctattttctgatgacaaagccctccacaggattgctgcctgg
ccatcagggagtgcctctgtaactgaggctgagatcccactttcagtcctccagctgtggcccatccctgctcc
gcccaccgggtatggcctgtcctaggctcttaggtatggctgcattgtgaaatgatggctacagagctggcatc
teetgtagtetggttcatctagtgcactacctcatagttaaaagaaatctgtttaagccactgagggtggctcc
tagtgccaactccaagaacaggaagcttcccttttttgggaggaggggcagatggtaacatggatcgtccaggt
caatgggagcagggcaaccacagtaagtactggacaacaacacaaaactccatgtgtggcttccatcgagtccc
tctccaattggtttggtcttctccgtcccatgcagcactttagcaaggggcctggctgaaggctatgaattgtg
tggagcctcctcattgcagtctccaaccatctgatgctgggaaaatgtcaccaggatgcagccatgccgtgtgg
ccaatgaaccgagaaaacaccccttttctagaatgctctaaagaggcagaataatccagaggtgaggaaggaaa
tactccaccagagacccaggcagttcctacaaaagccagactttccttcacctagggagtgacaagaccagtgg
aaaacactctcaagcagtaacccccaaatgctctgcaagccagtggcgtccagataccgcacaagcgagtgggc
tgtctaatcccatcatcatgatgtaaatatctctaggctgccctgggctgtgcctgaccctgtcttcagctttc
cacacctccacctacagcccatgcacagaaggaccacccaggaatgctgcaagtgtggcacctccagggccacc
cagggagaaggagggcagctatgctggtggctccaggcccatttggcgggtggtaccttcacaccacaaagccc
aaactgaggccccagatttggctgatgagggcatattggacaggggtcacttatgctcttccccattgccacct
ggcctctggctacctggacttggctacctgtggatcctctcacaggtgccaccatcttggctgagtctccagat
gcgaggtccctgaggcagtggcgggcttctcgctaatgctgatgggattaggaatgggataggtggggagggcc
ctggactgggccctgatgagecaagtgggtttttagaggggctactggtacatttcagggacaggacatctggt
agagctaagctggggcaataaggagccactgctaatctgagagctagaaacaatcagcttctgggtcattatta
attagggtagtttgggctgtgtggaagtcacgtactatatggggtagccacagctctctctacagataatctct
aagacttctgattgggactgtgtgaatgcagtagcaatatctcttcttactgccaggccctgccagtcctgcct
ccacgccctggctggccccccttatgatctgacccatgccaggctgccatagtatgttacttctgcattagcac
tccttgggacctgcctctccactgtccctcagactttaaagaactatacaaacccaaggggctcttcccaagag
aattgatatgacttgaggtgattccatttctggaagtagtcactccattttctgcctcactctttcagtgcttc
acagagcaggttcgaacgaaggagccatccaactaaccgtcatgttcgggcaaccgaagaagggagtggcagga
tttcctttggagacttctggaattagacagcagtttaatgcaagcatctaaattctctccctcccagagtctca
ttaaaactacagtaagagtttgtgttttgttttgtttttaaagacaaaatcccaccaggatagagagaatagga
gaggagataacagcatcataatttatgaaactaaaatgcagatagaccaggattaactgactacacagcaccaa
ggaagctgaatcacaagacagcagaggagaaaactggaaaggatcgtggtctatacggcagaatcttcccaagc
ctcaggaggaggagctctagatgttcccagatctgggaggtaaagtggaatggggggacatggtcagcgtaatg
gggttgggctggaagcaggttaaggagcaggcagatctctgaatcccctctctgactctgtgtccccaggcatc
tgcctgtcccccaccctggaagaggtctggcttgaccctttgtctggtgaatttcctgctctgctttcctggtc
ctgctggccggatcagtggaggccactcacttcaccccacagggatgttctgtgttgccctacacctgggaact
ggaggtactggaggcaggctgtggtgagcttgaaagcaaaacacagagggcagtccaatctctttggccatatt
tcttctgcatatccaataccatgtccacaactctgctagtgtcctgatggtggtgggctctacacattcccggg
aagctgaaggcagataatgaccaggacaggtcaacctctcttcttctgaaagccttcatctactaatggcctgg
gactcttcccttaaatgcttagattgtgtcttccactaaggttttttgctgttgctgttgtttgtttgtttgtt
tgtttgtttgtttgtttgttttgagacggaatctcactctgtcgcccaggctggagtgtagtggcacaatctca
gctcaccacaaccttcacctcctaggttgaaggggttctcctgcctcagcctcctgtgtagctaggattacagg
cacatgccaccatgcctggctaatttttgtatttttggtagagacaggatttcgccatgttggccaggctggtc
ttgaactcctgacctcaggtgatctgcctaccttggtctcccaaagtgetgggattacaggtgtgagecaccac
acccggccaaggtttttgtttgtttgtttgtttgtttgtttgttttgtattgaggcagggtatcactctggtca
cccaggctggagtgcagtagtgcaatcacggctcactgaaacctccacctccctggcgggctcaggtgatcctg
ccacctcagcttcccaggtagctgggactacaggcttgtaccaccactcccagctaatttttgcgtttttagta
gagacagggtttccccatgttgcccaggttggtctcaaactctgggctcaagcgatctgcctgcctcagcctcc
caaagtgctgggattacaggtgtaagccaccgtacccggccccgccactaaggttttgaaaatgaagcaattac
aagtttaagtctattaataagtgatgaagccatgtagaaaagcagaataattatcttggatcaggaaggtcaca
tgaggatctacttgggggttgtcaatattctatttcttgacctgatcagtgttgacagcaggttttaatttttt
acttctttttgtttgtttgtttttgagacggagtcttgetctgtctcccaggctggagtgcagtggtatgatct
cggctcactgcaacctccgcctcctgggttcaagctgttctcctgcctcagcctccccagtagctgggattaca
ggcaggcaccaccacgaccagctaatttttgtatttttagtagagactgggtttcaccatcttggccaggctgg
tctcgaacttctgatctcgtgatccgccctccttggcctcccaaagtgctgggattacaggcttgagccagcgt
gcccggcccattttttacttccttattaaactgtacatataggccttgcacacttttctgcatcaatgttatat
tccacaataaagggaaaaggtatatacacaacttgataccagtaatgtgaaacatatatttctacatagaaaaa
aaaatgactgaaatactgcactccaatgtgttcacacagtagttgtttctggattatttatatattaaatgttt
atatattgtattatgccatgaggtttgtgttttctctccacttttctgcattttccaagtttactacaaagagc
acatattactcttataatcagaaagtcataaaatatatttaaaaagacaaaattgaaactaataaggatcaaca
caaaacagatgagecatctgtggaaatccgcacagaatactacctaaagagattggtgacgtgcatgatctcac
taggatgagcacaaagcttgccagagcctagggtctatttctagggttggctcttggaagccaggatagttgtt
atctctgggaagagggaggggcacacaaggggcttctaaaacattctgaatgttctatttctgaacctggttgg
tgggtacatgactgttggttttattattatatgttttatatactcttccgtatgtatggtgtggattccaaaaa
aagatttcctttagagaaaaccagaatcacataagtagaaaatatggtgctatgttgaaggaacaactcaagtt
tatataaaatcatcatcatttataggcttaaaaagttgctttggaattttggtctaactgacttgtcttttctg
cagcaaaccaegetccttctggacgtgetccaggcagaggggattagggtgggttcaaggctgcaagtacctag
ctcagcacactctcttcaggggacttagagtttgtctggtgttggctctctgagctcttgtcaggaatgccgac
ccttccgaggttcaggatttgaagcctgccttcccaccccagatttggtccacacagacactcaagtatgtatt
tcaactacaaatgacctgtactttcctattactcctctctttcatggtaacctttctggtatccttccttccct
acatttatgggagggggacatcattctctgctctcctgtcactgaaggctccaccttctgtcttcttctgaccc
atctggttttcctggggccacctcctctccttaccaccctaacgcttttgtaacttgaggagaaatgagagatc
acctagtcaggtcatcattctctgtagatgaagaggcccaatggtttgctcaagaattgccaagcgagttaaag
acagagagtatgagagtcagcaagacctacagaaagcatctatctgcactgttttgcagggacttagcctttgt
gtgtggactcctggaatgccacccactaagaaacattgtctgacaccaactccccacttggtaggtggggacac
tgaaactcatggcaggaaagggccttgccccaagccagggcagagtgtcactcatcactctcaattttcagtcc
agggcaccttgttgtgactatcccaaaggcagccactttccctggtctgaaagacctgaagagagaagagaaga
gaaggatggaaggcagagtatgcggctttgattcatttcctggtgaaaacagatctatacgagaagcaaatttc
acgaaagggaagagaagaaagtgtcccatacgttgctggcctgtttcaaccttgctttgattcttgctgaaaag
ggtaccgtgtatttctgagttcaacatgcagaccagtgttaggaaagccactgcacctccactttagcctccag
ggctgtgccctgcaaatggcctgcagccttggtgcctcgctctccagactgcattttggaagatgggacagagg
cttatggaagcccacattagaacgggggagcagaatgggtgagatgagggatccttgatagtgaaccagatgaa
ggaatggtagccaaatgccaggcctcctttgtggcttcaatccaaaggctctggagcccttccagggcagaaca
tcaggcatgtttacccccactgtcctcaacagtgacagaggtgcaatcttgggcagctggccattttgaaagca
acctccttaatctcaactgggaaggctccctagcaggacccctgtgttgcacacctggaggaagctagactaac
cagaagctcagcacggttccatctgggatgcccaggtctgagacgaaaaaggtaactctcttttctgggtcctg
gcccagttgtgtctctctccacctcattctctgagatgcctgtctccccttttttgtcccatcaggaggcaaga
gctatcactgggccagactccaccagaagccaagccagcttgttacccagcttctcagggagcaaagaacagcc
ttgtttctatcttatccccactgtcccctgcccctgccccacctcccagccattcagcttctggcttccccaga
gctgcctgcttctttgtggtcctccattccttgaaaagaccttctagtcattagtgtatataaatggccactta
gcccagattacagtgaggtcaacagctggggctctgagaattgtcacacactggcacaggagaggaggctattc
ttccagagaatttggagggcactcccatccacttacaacaaaaagcccatccactgtgcttggcagtaggtgat
ctgagaaccaatggaaccaggttaatcctgtggcactgttgagtgaggagagcagtggcgggcactggaaaata
tcagagacaaggcaggagacctgaaatctaggcttagctcctcatatacttggcagctgtatgacctcagacaa
ccagtgttacctctctaagcctcagtttcctcatgcaaaaggagggggaataacaacagagcccactgcttggg
ggtgttgtgaggacaggatgaaaaaacaaacagaaatccctcagtacaggattcagtgcagtggacagtcttgc
aaggtctggttcagccctccacccctaccctcaccagtataaagaactctggcctacaagtcagatgacctgag
ttttaatctcagctttgccattagccgtgtgaacttgagaaagtccctttcctttttacatctattgggatgat
catgcattttttgtcctttattctgttaatatagtgtgttacattgattgcttttcatagactgaaccagcctt
gtattccagggataaatctcacttggtcatggtgtataatcctttatacaaatgttgctgggttgagtttgcta
gtattttgttgaagatttttatgtcttgattcataaggaatattggtgtaccttccccttttatggccacagtt
tccctacaatgatgtagtcgaactagacaacctccaatatctttcagtattcatgtcctctgattctgtgaaac
taagaaaattaagaaatagtgattcataggcacaaggcaggcaaaacttagactccttgtagaataattaggaa
gccaaatattcagtgtgcttatttctcaaataaccttagtttctccagtctgccccaactccgaggcctgaata
tctctagatgcttatgatggcaactaaagcctaaaagctaattcattttaaagttcttccaaatgcatagggtt
ttatttttccagacctgggttcagatggggaatttgacaaacaatggaaagggggaaaaacaacaatctaaaca
ctgagtgacaaagtaacaaagaaatagtctagctatcagccagtcaagccagccttggctttgctatccaaagt
agtcagtctaattctaccaccagtttctgttcctgtagctgtctactgcctgccagggactctgccttcccacc
cacaactaccaatggaaggatgtggtgaccataccagtggctgctgacatctcctgccatgggaagcataattg
cctccagcagcctcccccttagatecatcatttttgttgcacttggcctgggctgtactcccggccaatgactg
aacatggtgagcatagtaatgcaggcccatttctgtgaggagcaggactcctccagtaggtgactttggctcaa
ggactctctattggcctggttgaacttttcctgaactgtgctactgtctgagactcttcttacccaatcctctt
tctcgccccaattgtcacagaccacctgcattgtggtctgagtctctccccaccttctcttgctcttccctgtt
tatctttcacaggcatttcccccagtacattccttgaatgtctaacccgatacgggtgcctgacttttggcaga
cctaagcagacaaaaaggagtacttggttacctagctcttctttctaccacaaacatcgagggaaccctttttc
cctcacccctctgccacacccccactgccccagtgaacaaccacagagagagctgtggtataatattaggctgg
tgcaaaagtaattgcggtttttgccattacttttaatggtaaaaaccgcaattacttttgcacctacctagtat
ttgtgtccccccaaattcatatgttgaaacctaacccacaatatgatgtcattaggaggcaagaccttgaggag
gtgattagatgatggggtggagctctcctgaatgagattagtgcccttataagaagaagcccaaggaagctacc
ttgactcttccatcacatgagaatgcagcaagaaggcaccatctactaatcaggaagagagctctcaccagaca
ctgaatctgccagtgtcttgatcttgaagttcccagcctccagaactatgcataatgcatttccattgtctcta
agccacccagcctatggtattttgtcatagcagcctgaactgactaagacagtgagccacatgagaagtgcccc
aacccctcccttaagcacttggctcacagatcagtgggttcatttctgcctgagttttattgttattctgtaga
tttcttgggctagatatatttttctgttattttccttcttcacctcagtcatgaattggttgttttaaaaaaga
caatgtaagtcatggggaaactcctgacaactctactctcctagggttcctgataaaaggggattcagttgagt
cctctgatggtctctacctgccaaagtccagcagcccttagcaaacatgetgetcgtttctgtagagaaggtgc
tggtgtcccaccatacttctctctccctcatgaagggcttgcgacccagcaaatgggtggcttatatgggtctg
tttcaaaggaagagccagctctgggaagaaaaacgatgagcataagcataacctaccactgtgcctgggaaagc
agacaacttttttgatgtgtgaatatctaatgagaatggaatccatcaattaccttaaacttaggcacagtctt
caaattcaatatatgtgggatatacttttagtcagtttgtagacgttatttgtaataaataatctggcttctct
aaagaaattattttaagtgtttggtttggtttgatttaatggtaaaattatatttagtggcagagaattatagc
aatggtgataaactatagagtgtcataagttcatatcttattctcacatttgaagctgcctgcagatgcattca
agatgcagccagaagtcaggagactcaggctgttatttggagctcatcattttacagccttgctggactcccac
tttctcaggggaaaaatgtggtgttgacccagattagctctccaggccctgctgagttgggcactctgtaagct
ggagggtcttctattgtcttcacctaagtgtcaatcaacaacccaaatgggcatgggggaagagggagctgggc
caatgcccagggtgcctggtagagagataccttgggcactggaaggcaccagcttcccagagagaagggggagg
gccatgaaaaagttggctgtagatgccagggacactgggactctccagctgtgtgtttgtgtcttctgaagact
tatgtttcattcctttggagcatgcataatcatacactgtgggatgtgttatatagattgcttgatagttcacc
actgtaataaaatactgtgactggaatctgctcccagtctgcctttgatagcacttgtgcaacacacatttact
gagcatttacagtgatccaggacctgtgttgtgaaaacattgatggacaaggcagatggtggagcacgtcagtg
aggatttttaacaaaggctggtaagtgctataaaggaacattgtaggacactagagaacaaagaacaggagaac
ctgacttaggctggggtggggcgttggttagaggaggctccttggaggacatgaggtttaagctgtgacctgag
gatgaatagatgttggccaggtgaggtaccggtatttgtcagccttaccagtaaaaaagaaaacctattaaaaa
aaaaatacacatacaaagcctcatcagecatggcttaccagagaaagtacagcgggcacacaaaccacaagctc
taaagtcactctccaacctctccacaatatatatacacaagccctaaactgacgtaatgggactaaagtgtaaa
aaatcccgccaaacccaacacacaccccgaaactgcgtcaccagggaaaagtacagtttcacttccgcaatccc
aacaagcgtcacttcctctttctcacggtacgtcacatcccattaacttacaacgtcattttcccacggccgcg
ccgccccttttaaccgttaaccccacagccaatcaccacacggcccacactttttaaaatcacctcatttacat
attggcaccattccatctataaggtatattattgatgatg (SEQ ID NO: 192)
CD33 E1 sequence in FIG. 5B
CTGCTGTGGGCAGGTGAGTG (SEQ ID NO: 193)
gRNA E1 (corresponds to DNA of SEQ ID NO: 4):
CCCCUGCUGUGGGCAGGUGAGUG (SEQ ID NO: 194)
gRNA E2 (corresponds to DNA of SEQ ID NO: 193):
CCCCAGUUCAUGGUUACUGGUUC (SEQ ID NO: 195)

1. A method of selectively protecting a cell from an anti-CD33 therapeutic, the method comprising contacting the cell with a base editing system comprising a base editing enzyme and a guide RNA (gRNA), wherein the base editing system inactivates expression of CD33.

2. The method of claim 1, wherein the contacting comprises administering to a system or subject comprising the cell:
a nucleic acid encoding the base editing enzyme and a nucleic acid encoding the gRNA; or
the base editing enzyme and the gRNA.

3. The method of claim 2, wherein the system is an in vitro or ex vivo cell or cell culture.

4. A method of selectively protecting a cell of a human subject from an anti-CD33 agent, the method comprising:
administering to a human subject a viral vector comprising a nucleic acid sequence encoding a base editing system comprising a base editing enzyme and a guide RNA (gRNA), wherein the base editing system inactivates expression of CD33; and
administering to the human subject the anti-CD33 agent.

5. A population of cells comprising a first subpopulation expressing CD33 and a second subpopulation in which CD33 expression is inactivated, wherein one or more cells of the population comprise at least one base editing agent of a base editing system selected from a base editing enzyme and a guide RNA (gRNA), wherein the base editing system inactivates expression of CD33, optionally wherein CD33 expression is inactivated in at least 5%, 6%, 7%, 8%, 9%, 10%, 20%, 30%, 40%, or 50% of cells of the population.

6. A cell comprising a base editing system comprising a base editing enzyme and a guide RNA (gRNA), wherein the base editing system inactivates expression of CD33.

7. A base editing system that inactivates CD33 in a cell, the base editing system comprising a base editing enzyme and a guide RNA (gRNA).

8. A kit comprising a base editing enzyme of a base editing system and a guide RNA (gRNA) of a base editing system, wherein the base editing system inactivates expression of CD33, optionally further comprising an anti-CD33 agent and/or instructions for inactivation of CD33 in one or more cells.

9. The method, population, cell, system, or kit of any one of claims 1-8, wherein the base editing system is engineered to cause a genetic modification that inactivates CD33, wherein the inactivating genetic modification comprises a genetic modification at a splicing site of a nucleic acid encoding CD33, optionally wherein the splicing site is a splicing donor site or a splicing acceptor site, optionally wherein the splicing site is an intron 1 splicing donor site, an exon 2 splicing acceptor site, or an exon 3 splicing acceptor site of a nucleic acid encoding CD33.

10. The method, population, cell, system, or kit of any one of claims 1-8, wherein the base editing system is engineered to cause a genetic modification that inactivates CD33, wherein the inactivating genetic modification comprises introduction of a stop codon within a nucleic acid encoding CD33.

11. The method, population, cell, system, or kit of claim 10, wherein the inactivating genetic modification comprises introduction of a stop codon within exon 2 or exon 3 of a nucleic acid encoding CD33.

12. The method, population, cell, system, or kit of any one of claims 1-9, wherein the gRNA is engineered to cause a CD33-inactivating nucleic acid sequence modification selected from C to T at position 38 (G to A on forward strand, intron 1 splicing donor), C to T at position 481 (G to A on forward strand, intron 2 splicing donor), A to G at position 98 (exon2 splice acceptor), A to G at position 683 (exon3 splice acceptor), or A to G at position 1189 (exon4 splice acceptor) of CD33 (using SEQ ID NO: 15 as a reference).

13. The method, population, cell, system, or kit of any one of claims 1-12, wherein the gRNA is engineered to cause a CD33-inactivating nucleic acid sequence modification encoded by any of SEQ ID NOs: 4, 5, 19, 20, 21, and 22, optionally wherein the nucleic acid sequence modification is A to G at position -113 or A to G at position -175 of CD33.

14. The method, population, cell, system, or kit of any one of claims 1-13, wherein the gRNA has at least 80% sequence identity with a sequence selected from SEQ ID NOs: 4, 5, 19, 20, 21, and 22.

15. The method, population, cell, system, or kit of any one of claims 1-13, wherein the gRNA has at least 90% sequence identity with a sequence selected from SEQ ID NOs: 4, 5, 19, 20, 21, and 22.

16. The method, population, cell, system, or kit of any one of claims 1-15, wherein the base-editing system comprises a cytosine base editing enzyme.

17. The method, population, cell, system, or kit of claim 16, wherein the gRNA is engineered to cause a CD33-inactivating nucleic acid sequence modification selected from C to T at position 38 (G to A on forward strand, intron 1 splicing donor), or C to T at position 481 (G to A on forward strand, intron 2 splicing donor) of CD33 (using SEQ ID NO: 15 as a reference).

18. The method, population, cell, system, or kit of claim 16 or 17, wherein the gRNA is engineered to cause a CD33-inactivating nucleic acid sequence modification encoded by any of SEQ ID NOs: 4, 5, 20, 21, and 22.

19. The method, population, cell, system, or kit of claim 16-18, wherein the gRNA has at least 80% sequence identity with a sequence selected from SEQ ID NOs: 4 and 5.

20. The method, population, cell, system, or kit of claim 16-19, wherein the gRNA has at least 90% sequence identity with a sequence selected from SEQ ID NOs: 4 and 5.

21. The method, population, cell, system, or kit of any one of claims 16-20, wherein the cytosine base-editing enzyme is selected from BE1, BE2, BE3, HF-BE3, BE4, BE4max, BE4-GAM, YE1-BE3, EE-BE3, YE2-BE3, YEE-BE3, VQR-BE3, VRER-BE3, Sa-BE3, SA-BE4, SaBE4-Gam, SaKKH-BE3, Cas12a-BE, Target-AID, Target-AID-NG, xBE3, eA3A-BE3, A3A-BE3, and BE-PLUS, optionally wherein the cytosine base-editing enzyme is BE4max and/or SaBE4-Gam.

22. The method, population, cell, system, or kit of any one of claims 1-15, wherein the base-editing system comprises an adenine base editing enzyme.

23. The method, population, cell, system, or kit of claim 22, wherein the gRNA is engineered to cause a CD33-inactivating nucleic acid sequence modification selected from A to G at position 98 (exon2 splice acceptor), A to G at position 683 (exon3 splice acceptor), or A to G at position 1189 (exon4 splice acceptor) of CD33 (using SEQ ID NO: 15 as a reference).

24. The method, population, cell, system, or kit of claim 22 or 23, wherein the gRNA is engineered to cause a CD33-inactivating nucleic acid sequence modification encoded by any of SEQ ID NOs: 19, 20, 21, and 22.

25. The method, population, cell, system, or kit of claim 22-24, wherein the gRNA has at least 80% sequence identity with a sequence selected from SEQ ID NOs: 19, 20, 21, and 22.

26. The method, population, cell, system, or kit of claim 22-25, wherein the gRNA has at least 90% sequence identity with a sequence selected from SEQ ID NOs: 19, 20, 21, and 22.

27. The method, population, cell, system, or kit of any one of claims 22-26, wherein the adenine base editing enzyme is TadA*-dCas9, TadA-TadA*-Cas9, ABE7.9, ABE 6,3, ABE7.10, and/or ABE8e.

28. The method, population, cell, system, or kit of any one of claims 1-27, wherein the cell or cells are hematopoietic stem cells (HSCs).

29. The method, population, cell, system, or kit of any one of claims 1-27, wherein the cell or cells are hematopoietic stem and progenitor cells (HSPCs).

30. The method, population, cell, system, or kit of any one of claims 1-27, wherein the cell or cells are CD34+ HSCs and/or CD34+CD45RA-CD90+ HSCs.

31. The method, population, cell, system, or kit of any one of claims 1-30, wherein the base editing enzyme and/or gRNA are encoded by a vector. or synthesized in vitro

32. The method, population, cell, system, or kit of any one of claims 1-30, wherein the base editing enzyme and/or gRNA synthesized in vitro.

33. The method, population, cell, system, or kit of claim 31, wherein the vector is a viral vector, optionally wherein the viral vector is an adenoviral vector.

34. The method, population, cell, system, or kit claim 33 wherein the adenoviral vector is a helper dependent adenoviral vector.

35. The method, population, cell, system, or kit claim 33 or 34, wherein the adenoviral vector is a helper-dependent Ad35 viral vector.

36. The method, population, cell, system, or kit of claims 32-35, wherein the vector selectively targets HSCs or HSPCs.

37. The method, population, cell, system, or kit of any one of claims 32-36, wherein the vector further encodes a therapeutic polypeptide and/or further comprises a therapeutic gene.

38. The method, population, cell, system, or kit of claim 37, wherein the therapeutic polypeptide is selected from a checkpoint inhibitor, a gene editing molecule, a chimeric antigen receptor that specifically binds a cellular antigen (e.g. a cancer antigen or a viral antigen), a T-cell receptor that specifically binds a cellular antigen (e.g. a cancer antigen or a viral antigen), γ-globin; soluble CD40; CTLA; Fas L; antibodies to CD4, CD5, CD7, CD52, etc.; antibodies to IL1, IL2, IL6; an antibody to TCR specifically present on autoreactive T cells; IL4; IL10; IL12; IL13; IL1Ra, sIL1RI, sIL1R11; sTNFRI; sTNFRII; antibodies to TNF; P53, PTPN22, and DRB11501/DQB1*0602; globin family genes; WAS; phox; dystrophin; pyruvate kinase (PK); CLN3; ABCD1; arylsulfatase A (ARSA); SFTPB; SFTPC; NLX2.1; ABCA3; GATA1; ribosomal protein genes; TERC; CFTR; LRRK2; PARK2; PARK7; PINK1; SNCA; PSEN1; PSEN2; APP; SOD1; TDP43; FUS; ubiquilin 2; C9ORF72, von Willebrand factor (VWF), FI, FII, FV, FVII, factor VIII (FVIII), FIX, FX, FXI, and/or FXIII, optionally wherein the therapeutic polypeptide is selected from FVIII and/or FIX.

39. The method, population, cell, system, or kit of claim 37, wherein the therapeutic gene is selected from FancA, FancB, FancC, FancD1, FancD2, FancE, FancF, FancG, Fancl, FancJ, FancL, FancM, FancN, FancO, FancP, FancQ, FancR, FancS, FancT, FancU, FancV, FancW, γC, JAK3, IL7RA, RAG1, RAG2, DCLRE1C, PRKDC, LIG4, NHEJ1, CD3D, CD3E, CD3Z, CD3G, PTPRC, ZAP70, LCK, AK2, ADA, PNP, WHN, CHD7, ORAI1, STIM1, CORO1A, CIITA, RFXANK, RFX5, RFXAP, RMRP, DKC1, TERT, TINF2, DCLREIB, SLC46A1, ABLI, AKT1, APC, ARSB, BCL11A, BLC1, BLC6, BRCA1, BRCA2, BRIP1, C46, CAS9, C-CAM, CBFAI, CBL, CCR5, CD19, CDA, C-MYC, CRE, CSCR4, CSFIR, CTS-I, CYB5R3, DCC, DHFR, DLL1, DMD, EGFR, ERBA, ERBB, EBRB2, ETSI, ETS2, ETV6, FCC, FGR, FOX, FUSI, FYN, GALNS, GLB1, GNS, GUSB, HBB, HBD, HBE1, HBG1, HBG2, HCR, HGSNAT, HOXB4, HRAS, HYAL1, ICAM-1, iCaspase, IDUA, IDS, JUN, KLF4, KRAS, LYN, MCC, MDM2, MGMT, MLL, MMACI, MYB, MEN-I, MEN-11, MYC, NAGLU, NANOG, NF-1, NF-2, NKX2.1, NOTCH, OCT4, p16, p21, p27, p57, p73, PALB2, RAD51C, ras, at least one of RPL3 through RPL40, RPLPO, RPLP1, RPLP2, at least one of RPS2 through RPS30, RPSA, SGSH, SLX4, SOX2, VHL, and/or WT-I.

40. A population of cells comprising a first subpopulation expressing CD33 and a second subpopulation in which CD33 expression is inactivated, wherein one or more cells comprises an inactivated CD33 gene comprising a nucleic acid sequence according to one or more of SEQ ID NOs: SEQ ID NOs: 4, 5, 19, 20, 21, or 22, optionally wherein CD33 expression is inactivated in at least 5%, 6%, 7%, 8%, 9%, 10%, 20%, 30%, 40%, or 50% of cells of the population, optionally wherein the cells are HSCs, HSPCs, CD34+ HSCs, and/or CD34+CD45RA-CD90+ HSCs.

41. A cell comprising an inactivated CD33 gene comprising a nucleic acid sequence according to one or more of SEQ ID NOs: SEQ ID NOs: 4, 5, 19, 20, 21, or 22, optionally wherein the cell is an HSC, HSPC, CD34+ HSC, and/or CD34+CD45RA-CD90+ HSC.

42. The method, population, cell, system, or kit of any one of claims 1-41, wherein one or more of the cell or cells is contacted with an anti-CD33 agent.

43. A pharmaceutical formulation comprising a population, cell, system, or kit of any one of claims 5-42 and a pharmaceutically acceptable carrier.

44. A method of treating a subject in need thereof, the method comprising administering to the subject a population, cell, system, kit, or pharmaceutical formulation of any one of claims 5-43.

45. The method of claim 44, wherein the method comprises administering to the subject an anti-CD33 agent.

46. The method of claim 44 or 45, wherein the subject is need of treatment for a primary immune deficiency, a secondary immune deficiency, or a disorder selected from FA, SCID, Pompe disease, Gaucher disease, Fabry disease, Mucopolysaccharidosis type I, familial apolipoprotein E deficiency and atherosclerosis (ApoE), viral infections, and/or cancer.

47. The method of claim 44 or 45, wherein the subject is need of treatment for a hematology condition, optionally wherein the hematology condition is a platelet disorder, a bone marrow failure condition, a red cell disorder, an autoimmune hematology, a primary immunodeficiency, or an inborn error of metabolism.

48. The method of claim 44 or 45, wherein the subject is need of treatment for a hematology condition selected from Bernard-Soulier syndrome, Glanzmann thrombasthenia, Diamond-Blackfan anemia, pyruvate kinase deficiency, acquired thrombotic thrombocytopenic purpura (aTTP), congenital thrombotic thrombocytopenic purpura (cTTP), Wiskott-Aldrich syndrome (WAS), Severe combined immunodeficiency due to adenosine deaminase deficiency (ADA-SCID), X-linked severe combined immunodeficiency (SCID-X1), DOCK 8 deficiency, major histocompatibility complex class II deficiency (MHC-II), CD40/CD40L deficiency, hereditary hemochromatosis, and phenylketonuria (PKU).

49. The method, population, cell, system, or kit of any one of claims 42-48, wherein the anti-CD33 agent comprises an anti-CD33 antibody, an anti-CD33 immunotoxin, an anti-CD33 antibody-drug conjugate, an anti-CD33 antibody-radioisotope conjugate, an anti-CD33 bispecific antibody, an anti-CD33 bispecific immune cell engaging antibody, an anti-CD33 trispecific antibody, an anti-CD33 chimeric antigen receptor (CAR) with one or more binding domains, hp67.6, lintuzumab, SGN-CD33A, and/or AMG 330.

50. The method, population, cell, system, or kit of any one of claims 42-48, wherein the anti-CD33 agent comprises a binding domain derived from hp67.6, lintuzumab, SGN-CD33A, and/or AMG 330, wherein the anti-CD33 agent comprises one or more, or all, CDRs of hp67.6, lintuzumab, SGN-CD33A, and/or AMG 330, and/or wherein the anti-CD33 agent comprises a bispecific antibody comprising a combination of binding variable chains or a binding CDR combination of hp67.6, lintuzumab, SGN-CD33A, and/or AMG 330.

51. The method, population, cell, system, or kit of any one of claims 42-48, wherein the anti-CD33 agent comprises an antibody-drug conjugate or an antibody-radioisotope conjugate wherein the drug or radioisotope are selected from taxol, taxane, cytochalasin B, gramicidin D, ethidium bromide, emetine, mitomycin, etoposide, tenoposide, vincristine, vinblastine, colchicin, doxorubicin, daunorubicin, dihydroxy anthracinedione, mitoxantrone, mithramycin, maytansinoid, dolastatin, auristatin, calicheamicin, pyrrolobenzodiazepine, nemorubicin PNU-159682, anthracycline, vinca alkaloid, trichothecene, CC1065, camptothecin, elinafide, actinomycin D, 1-dehydrotestosterone, glucocorticoids, procaine, tetracaine, lidocaine, propranolol, puromycin, ricin, CC-1065, duocarmycin, diphtheria toxin, snake venom, cobra venom, mistletoe lectin, modeccin, pokeweed antiviral protein, saporin, Bryodin 1, bouganin, gelonin, Pseudomonas exotoxin, iodine-131, indium-111, yttrium-90, lutetium-177, astatine-211, bismuth-212, and/or bismuth-213 and/or wherein the antibody-drug conjugate comprises GO.

52. The method, population, cell, system, or kit of any one of claims 42-48, wherein the CD33-targeting agent comprises a bispecific antibody comprising at least one binding domain that activates an immune cell, optionally wherein the immune cell is a T-cell, natural killer (NK) cell, or a macrophage and//or wherein the binding domain that activates an immune cell binds CD3, CD28, CD8, NKG2D, CD8, CD16, KIR2DL4, KIR2DS1, KIR2DS2, KIR3DS1, NKG2C, NKG2E, NKG2D, NKp30, NKp44, NKp46, NKp80, DNAM-1, CD11b, CD11c, CD64, CD68, CD119, CD163, CD206, CD209, F4/80, IFGR2, Toll-like receptors 1-9, IL-4Rα, or MARCO, optionally wherein the binding domains of the bispecific antibody are joined through a linker.

53. The method, population, cell, system, or kit of any one of claims 42-48, wherein the CD33-targeting agent comprises a chimeric antigen receptor (CAR) comprising a binding domain that specifically binds CD33.

54. The method, population, cell, system, or kit of claim 53, wherein:
the CAR comprises an effector domain selected from 4-1BB, CD3ε, CD3δ, CD3ζ, CD27, CD28, CD79A, CD79B, CARD11, DAP10, FcRα, FcRβ, FcRγ, Fyn, HVEM, ICOS, Lck, LAG3, LAT, LRP, NOTCHI, Wnt, NKG2D, OX40, ROR2, Ryk, SLAMFI, Slp76, pTα, TCRα, TCRβ, TRIM, Zap70, PTCH2, or any combination thereof;
the CAR comprises a cytoplasmic signaling sequence derived from CD3 zeta, FcR gamma, CD3 gamma, CD3 delta, CD3 epsilon, CDS, CD22, CD79a, CD79b, or CD66d;
the CAR comprises an intracellular signaling domain and a costimulatory signaling region, optionally wherein the costimulatory signaling region comprises the intracellular domain of CD27, CD28, 4-1BB, OX40, CD30, CD40, lymphocyte function-associated antigen-1, CD2, CD7, LIGHT, NKG2C, or B7-H3;
the CAR comprises a spacer region; and/or
the CAR comprises a transmembrane domain.

55. The method, population, cell, system, or kit of any one of claims 42-54s wherein the anti-CD33 agent comprises a linker.

The application's sequence listing, which the Patent Office published only in electronic form, follows.

SEQUENCE LISTING (195 sequences)

SEQ ID NO: 1 - protein, 282 aa, Macaca fascicularis
MPLLLLPLLWAGALAMDPRVRLEVQESVTVQEGLCVLVPCTFFHPVPYHTRNSPVHGYWFREGAIVSLDSPVATNKLDQEVQEETQGRFRLLGDPSRNNCSLSIVDARRRDNGSYFFRMEKGSTKYSYKSTQLSVHVTDLTHRPQILIPGALDPDHSKNLTCSVPWACEQGTPPIFSWMSAAPTSLGLRTTHSSVLIITPRPQDHGTNLTCQVKFPGAGVTTERTIQLNVSYASQNPRTDIFLGDGSGRKARKQGVVQGAIGGAGVTVLLALCLCLIFFTVQ

SEQ ID NO: 2 - protein, 283 aa, Homo sapiens
MPLLLLLPLLWAGALAMDPNFWLQVQESVTVQEGLCVLVPCTFFHPIPYYDKNSPVHGYWFREGAIISRDSPVATNKLDQEVQEETQGRFRLLGDPSRNNCSLSIVDARRRDNGSYFFRMERGSTKYSYKSPQLSVHVTDLTHRPKILIPGTLEPGHSKNLTCSVSWACEQGTPPIFSWLSAAPTSLGPRTTHSSVLIITPRPQDHGTNLTCQVKFAGAGVTTERTIQLNVTYVPQNPTTGIFPGDGSGKQETRAGVVHGAIGGAGVTALLALCLCLIFFIVQ

SEQ ID NO: 3 - protein, 267 aa, Mus musculus
MLWPLPLFLLCAGSLAQDLEFQLVAPESVTVEEGLCVHVPCSVFYPSIKLTLGPVTGSWLRKGVSLHEDSPVATSDPRQLVQKATQGRFQLLGDPQKHDCSLFIRDAQKNDTGMYFFRVVREPFVRYSYKKSQLSLHVTSLSRTPDIIIPGTLEAGYPSNLTCSVPWACEQGTPPTFSWMSTALTSLSSRTTDSSVLTFTPQPQDHGTKLTCLVTFSGAGVTVERTIQLNVTRKSGQMRELVLVAVGEATVKLLILGLCLVFLIVMF

SEQ ID NO: 4 - DNA, 23 bp, Artificial Sequence
  intron 1 splicing donor site
cccctgctgtgggcaggtgagtg

SEQ ID NO: 5 - DNA, 23 bp, Artificial Sequence
  stop codon in exon2
ccccagttcatggttactggttc

SEQ ID NO: 6 - DNA, 8217 bp, Artificial Sequence
  ABE8e (Addgene #138489)
atatgccaagtacgccccctattgacgtcaatgacggtaaatggcccgcctggcattatgcccagtacatgaccttatgggactttcctacttggcagtacatctacgtattagtcatcgctattaccatggtgatgcggttttggcagtacatcaatgggcgtggatagcggtttgactcacggggatttccaagtctccaccccattgacgtcaatgggagtttgttttggcaccaaaatcaacgggactttccaaaatgtcgtaacaactccgccccattgacgcaaatgggcggtaggcgtgtacggtgggaggtctatataagcagagctggtttagtgaaccgtcagatccgctagagatccgcggccgctaatacgactcactatagggagagccgccaccatgaaacggacagccgacggaagcgagttcgagtcaccaaagaagaagcggaaagtctctgaggtggagttttcccacgagtactggatgagacatgccctgaccctggccaagagggcacgggatgagagggaggtgcctgtgggagccgtgctggtgctgaacaatagagtgatcggcgagggctggaacagagccatcggcctgcacgacccaacagcccatgccgaaattatggccctgagacagggcggcctggtcatgcagaactacagactgattgacgccaccctgtacgtgacattcgagccttgcgtgatgtgcgccggcgccatgatccactctaggatcggccgcgtggtgtttggcgtgaggaactcaaaaagaggcgccgcaggctccctgatgaacgtgctgaactaccccggcatgaatcaccgcgtcgaaattaccgagggaatcctggcagatgaatgtgccgccctgctgtgcgatttctatcggatgcctagacaggtgttcaatgctcagaagaaggcccagagctccatcaactccggaggatctagcggaggctcctctggctctgagacacctggcacaagcgagagcgcaacacctgaaagcagcgggggcagcagcggggggtcagacaagaagtacagcatcggcctggccatcggcaccaactctgtgggctgggccgtgatcaccgacgagtacaaggtgcccagcaagaaattcaaggtgctgggcaacaccgaccggcacagcatcaagaagaacctgatcggagccctgctgttcgacagcggcgaaacagccgaggccacccggctgaagagaaccgccagaagaagatacaccagacggaagaaccggatctgctatctgcaagagatcttcagcaacgagatggccaaggtggacgacagcttcttccacagactggaagagtccttcctggtggaagaggataagaagcacgagcggcaccccatcttcggcaacatcgtggacgaggtggcctaccacgagaagtaccccaccatctaccacctgagaaagaaactggtggacagcaccgacaaggccgacctgcggctgatctatctggccctggcccacatgatcaagttccggggccacttcctgatcgagggcgacctgaaccccgacaacagcgacgtggacaagctgttcatccagctggtgcagacctacaaccagctgttcgaggaaaaccccatcaacgccagcggcgtggacgccaaggccatcctgtctgccagactgagcaagagcagacggctggaaaatctgatcgcccagctgcccggcgagaagaagaatggcctgttcggaaacctgattgccctgagcctgggcctgacccccaacttcaagagcaacttcgacctggccgaggatgccaaactgcagctgagcaaggacacctacgacgacgacctggacaacctgctggcccagatcggcgaccagtacgccgacctgtttctggccgccaagaacctgtccgacgccatcctgctgagcgacatcctgagagtgaacaccgagatcaccaaggcccccctgagcgcctctatgatcaagagatacgacgagcaccaccaggacctgaccctgctgaaagctctcgtgcggcagcagctgcctgagaagtacaaagagattttcttcgaccagagcaagaacggctacgccggctacattgacggcggagccagccaggaagagttctacaagttcatcaagcccatcctggaaaagatggacggcaccgaggaactgctcgtgaagctgaacagagaggacctgctgcggaagcagcggaccttcgacaacggcagcatcccccaccagatccacctgggagagctgcacgccattctgcggcggcaggaagatttttacccattcctgaaggacaaccgggaaaagatcgagaagatcctgaccttccgcatcccctactacgtgggccctctggccaggggaaacagcagattcgcctggatgaccagaaagagcgaggaaaccatcaccccctggaacttcgaggaagtggtggacaagggcgcttccgcccagagcttcatcgagcggatgaccaacttcgataagaacctgcccaacgagaaggtgctgcccaagcacagcctgctgtacgagtacttcaccgtgtataacgagctgaccaaagtgaaatacgtgaccgagggaatgagaaagcccgccttcctgagcggcgagcagaaaaaggccatcgtggacctgctgttcaagaccaaccggaaagtgaccgtgaagcagctgaaagaggactacttcaagaaaatcgagtgcttcgactccgtggaaatctccggcgtggaagatcggttcaacgcctccctgggcacataccacgatctgctgaaaattatcaaggacaaggacttcctggacaatgaggaaaacgaggacattctggaagatatcgtgctgaccctgacactgtttgaggacagagagatgatcgaggaacggctgaaaacctatgcccacctgttcgacgacaaagtgatgaagcagctgaagcggcggagatacaccggctggggcaggctgagccggaagctgatcaacggcatccgggacaagcagtccggcaagacaatcctggatttcctgaagtccgacggcttcgccaacagaaacttcatgcagctgatccacgacgacagcctgacctttaaagaggacatccagaaagcccaggtgtccggccagggcgatagcctgcacgagcacattgccaatctggccggcagccccgccattaagaagggcatcctgcagacagtgaaggtggtggacgagctcgtgaaagtgatgggccggcacaagcccgagaacatcgtgatcgaaatggccagagagaaccagaccacccagaagggacagaagaacagccgcgagagaatgaagcggatcgaagagggcatcaaagagctgggcagccagatcctgaaagaacaccccgtggaaaacacccagctgcagaacgagaagctgtacctgtactacctgcagaatgggcgggatatgtacgtggaccaggaactggacatcaaccggctgtccgactacgatgtggaccatatcgtgcctcagagctttctgaaggacgactccatcgacaacaaggtgctgaccagaagcgacaagaaccggggcaagagcgacaacgtgccctccgaagaggtcgtgaagaagatgaagaactactggcggcagctgctgaacgccaagctgattacccagagaaagttcgacaatctgaccaaggccgagagaggcggcctgagcgaactggataaggccggcttcatcaagagacagctggtggaaacccggcagatcacaaagcacgtggcacagatcctggactcccggatgaacactaagtacgacgagaatgacaagctgatccgggaagtgaaagtgatcaccctgaagtccaagctggtgtccgatttccggaaggatttccagttttacaaagtgcgcgagatcaacaactaccaccacgcccacgacgcctacctgaacgccgtcgtgggaaccgccctgatcaaaaagtaccctaagctggaaagcgagttcgtgtacggcgactacaaggtgtacgacgtgcggaagatgatcgccaagagcgagcaggaaatcggcaaggctaccgccaagtacttcttctacagcaacatcatgaactttttcaagaccgagattaccctggccaacggcgagatccggaagcggcctctgatcgagacaaacggcgaaaccggggagatcgtgtgggataagggccgggattttgccaccgtgcggaaagtgctgagcatgccccaagtgaatatcgtgaaaaagaccgaggtgcagacaggcggcttcagcaaagagtctatcctgcccaagaggaacagcgataagctgatcgccagaaagaaggactgggaccctaagaagtacggcggcttcgacagccccaccgtggcctattctgtgctggtggtggccaaagtggaaaagggcaagtccaagaaactgaagagtgtgaaagagctgctggggatcaccatcatggaaagaagcagcttcgagaagaatcccatcgactttctggaagccaagggctacaaagaagtgaaaaaggacctgatcatcaagctgcctaagtactccctgttcgagctggaaaacggccggaagagaatgctggcctctgccggcgaactgcagaagggaaacgaactggccctgccctccaaatatgtgaacttcctgtacctggccagccactatgagaagctgaagggctcccccgaggataatgagcagaaacagctgtttgtggaacagcacaagcactacctggacgagatcatcgagcagatcagcgagttctccaagagagtgatcctggccgacgctaatctggacaaagtgctgtccgcctacaacaagcaccgggataagcccatcagagagcaggccgagaatatcatccacctgtttaccctgaccaatctgggagcccctgccgccttcaagtactttgacaccaccatcgaccggaagaggtacaccagcaccaaagaggtgctggacgccaccctgatccaccagagcatcaccggcctgtacgagacacggatcgacctgtctcagctgggaggtgactctggcggctcaaaaagaaccgccgacggcagcgaattcgagcccaagaagaagaggaaagtctaaccggtcatcatcaccatcaccattgagtttaaacccgctgatcagcctcgactgtgccttctagttgccagccatctgttgtttgcccctcccccgtgccttccttgaccctggaaggtgccactcccactgtcctttcctaataaaatgaggaaattgcatcgcattgtctgagtaggtgtcattctattctggggggtggggtggggcaggacagcaagggggaggattgggaagacaatagcaggcatgctggggatgcggtgggctctatggcttctgaggcggaaagaaccagctggggctcgataccgtcgacctctagctagagcttggcgtaatcatggtcatagctgtttcctgtgtgaaattgttatccgctcacaattccacacaacatacgagccggaagcataaagtgtaaagcctagggtgcctaatgagtgagctaactcacattaattgcgttgcgctcactgcccgctttccagtcgggaaacctgtcgtgccagctgcattaatgaatcggccaacgcgcggggagaggcggtttgcgtattgggcgctcttccgcttcctcgctcactgactcgctgcgctcggtcgttcggctgcggcgagcggtatcagctcactcaaaggcggtaatacggttatccacagaatcaggggataacgcaggaaagaacatgtgagcaaaaggccagcaaaaggccaggaaccgtaaaaaggccgcgttgctggcgtttttccataggctccgcccccctgacgagcatcacaaaaatcgacgctcaagtcagaggtggcgaaacccgacaggactataaagataccaggcgtttccccctggaagctccctcgtgcgctctcctgttccgaccctgccgcttaccggatacctgtccgcctttctcccttcgggaagcgtggcgctttctcatagctcacgctgtaggtatctcagttcggtgtaggtcgttcgctccaagctgggctgtgtgcacgaaccccccgttcagcccgaccgctgcgccttatccggtaactatcgtcttgagtccaacccggtaagacacgacttatcgccactggcagcagccactggtaacaggattagcagagcgaggtatgtaggcggtgctacagagttcttgaagtggtggcctaactacggctacactagaagaacagtatttggtatctgcgctctgctgaagccagttaccttcggaaaaagagttggtagctcttgatccggcaaacaaaccaccgctggtagcggtggtttttttgtttgcaagcagcagattacgcgcagaaaaaaaggatctcaagaagatcctttgatcttttctacggggtctgacactcagtggaacgaaaactcacgttaagggattttggtcatgagattatcaaaaaggatcttcacctagatccttttaaattaaaaatgaagttttaaatcaatctaaagtatatatgagtaaacttggtctgacagttaccaatgcttaatcagtgaggcacctatctcagcgatctgtctatttcgttcatccatagttgcctgactccccgtcgtgtagataactacgatacgggagggcttaccatctggccccagtgctgcaatgataccgcgagacccacgctcaccggctccagatttatcagcaataaaccagccagccggaagggccgagcgcagaagtggtcctgcaactttatccgcctccatccagtctattaattgttgccgggaagctagagtaagtagttcgccagttaatagtttgcgcaacgttgttgccattgctacaggcatcgtggtgtcacgctcgtcgtttggtatggcttcattcagctccggttcccaacgatcaaggcgagttacatgatcccccatgttgtgcaaaaaagcggttagctccttcggtcctccgatcgttgtcagaagtaagttggccgcagtgttatcactcatggttatggcagcactgcataattctcttactgtcatgccatccgtaagatgcttttctgtgactggtgagtactcaaccaagtcattctgagaatagtgtatgcggcgaccgagttgctcttgcccggcgtcaatacgggataataccgcgccacatagcagaactttaaaagtgctcatcattggaaaacgttcttcggggcgaaaactctcaaggatcttaccgctgttgagatccagttcgatgtaacccactcgtgcacccaactgatcttcagcatcttttactttcaccagcgtttctgggtgagcaaaaacaggaaggcaaaatgccgcaaaaaagggaataagggcgacacggaaatgttgaatactcatactcttcctttttcaatattattgaagcatttatcagggttattgtctcatgagcggatacatatttgaatgtatttagaaaaataaacaaataggggttccgcgcacatttccccgaaaagtgccacctgacgtcgacggatcgggagatcgatctcccgatcccctagggtcgactctcagtacaatctgctctgatgccgcatagttaagccagtatctgctccctgcttgtgtgttggaggtcgctgagtagtgcgcgagcaaaatttaagctacaacaaggcaaggcttgaccgacaattgcatgaagaatctgcttagggttaggcgttttgcgctgcttcgcgatgtacgggccagatatacgcgttgacattgattattgactagttattaatagtaatcaattacggggtcattagttcatagcccatatattgagttccgcgttacataacttacggtaaatggcccgcctggctgaccgcccaacgacccccgcccattgacgtcaataatgacgtatgttcccatagtaacgccaatagggactttccattgacgtcaatgggtggagtatttacggtaaactgcccacttggcagtacatcaagtgtatc

SEQ ID NO: 7 - DNA, 8217 bp, Artificial Sequence
  ABE8e-NG (Addgene #138491)
atatgccaagtacgccccctattgacgtcaatgacggtaaatggcccgcctggcattatgcccagtacatgaccttatgggactttcctacttggcagtacatctacgtattagtcatcgctattaccatggtgatgcggttttggcagtacatcaatgggcgtggatagcggtttgactcacggggatttccaagtctccaccccattgacgtcaatgggagtttgttttggcaccaaaatcaacgggactttccaaaatgtcgtaacaactccgccccattgacgcaaatgggcggtaggcgtgtacggtgggaggtctatataagcagagctggtttagtgaaccgtcagatccgctagagatccgcggccgctaatacgactcactatagggagagccgccaccatgaaacggacagccgacggaagcgagttcgagtcaccaaagaagaagcggaaagtctctgaggtggagttttcccacgagtactggatgagacatgccctgaccctggccaagagggcacgggatgagagggaggtgcctgtgggagccgtgctggtgctgaacaatagagtgatcggcgagggctggaacagagccatcggcctgcacgacccaacagcccatgccgaaattatggccctgagacagggcggcctggtcatgcagaactacagactgattgacgccaccctgtacgtgacattcgagccttgcgtgatgtgcgccggcgccatgatccactctaggatcggccgcgtggtgtttggcgtgaggaactcaaaaagaggcgccgcaggctccctgatgaacgtgctgaactaccccggcatgaatcaccgcgtcgaaattaccgagggaatcctggcagatgaatgtgccgccctgctgtgcgatttctatcggatgcctagacaggtgttcaatgctcagaagaaggcccagagctccatcaactccggaggatctagcggaggctcctctggctctgagacacctggcacaagcgagagcgcaacacctgaaagcagcgggggcagcagcggggggtcagacaagaagtacagcatcggcctggccatcggcaccaactctgtgggctgggccgtgatcaccgacgagtacaaggtgcccagcaagaaattcaaggtgctgggcaacaccgaccggcacagcatcaagaagaacctgatcggagccctgctgttcgacagcggcgaaacagccgaggccacccggctgaagagaaccgccagaagaagatacaccagacggaagaaccggatctgctatctgcaagagatcttcagcaacgagatggccaaggtggacgacagcttcttccacagactggaagagtccttcctggtggaagaggataagaagcacgagcggcaccccatcttcggcaacatcgtggacgaggtggcctaccacgagaagtaccccaccatctaccacctgagaaagaaactggtggacagcaccgacaaggccgacctgcggctgatctatctggccctggcccacatgatcaagttccggggccacttcctgatcgagggcgacctgaaccccgacaacagcgacgtggacaagctgttcatccagctggtgcagacctacaaccagctgttcgaggaaaaccccatcaacgccagcggcgtggacgccaaggccatcctgtctgccagactgagcaagagcagacggctggaaaatctgatcgcccagctgcccggcgagaagaagaatggcctgttcggaaacctgattgccctgagcctgggcctgacccccaacttcaagagcaacttcgacctggccgaggatgccaaactgcagctgagcaaggacacctacgacgacgacctggacaacctgctggcccagatcggcgaccagtacgccgacctgtttctggccgccaagaacctgtccgacgccatcctgctgagcgacatcctgagagtgaacaccgagatcaccaaggcccccctgagcgcctctatgatcaagagatacgacgagcaccaccaggacctgaccctgctgaaagctctcgtgcggcagcagctgcctgagaagtacaaagagattttcttcgaccagagcaagaacggctacgccggctacattgacggcggagccagccaggaagagttctacaagttcatcaagcccatcctggaaaagatggacggcaccgaggaactgctcgtgaagctgaacagagaggacctgctgcggaagcagcggaccttcgacaacggcagcatcccccaccagatccacctgggagagctgcacgccattctgcggcggcaggaagatttttacccattcctgaaggacaaccgggaaaagatcgagaagatcctgaccttccgcatcccctactacgtgggccctctggccaggggaaacagcagattcgcctggatgaccagaaagagcgaggaaaccatcaccccctggaacttcgaggaagtggtggacaagggcgcttccgcccagagcttcatcgagcggatgaccaacttcgataagaacctgcccaacgagaaggtgctgcccaagcacagcctgctgtacgagtacttcaccgtgtataacgagctgaccaaagtgaaatacgtgaccgagggaatgagaaagcccgccttcctgagcggcgagcagaaaaaggccatcgtggacctgctgttcaagaccaaccggaaagtgaccgtgaagcagctgaaagaggactacttcaagaaaatcgagtgcttcgactccgtggaaatctccggcgtggaagatcggttcaacgcctccctgggcacataccacgatctgctgaaaattatcaaggacaaggacttcctggacaatgaggaaaacgaggacattctggaagatatcgtgctgaccctgacactgtttgaggacagagagatgatcgaggaacggctgaaaacctatgcccacctgttcgacgacaaagtgatgaagcagctgaagcggcggagatacaccggctggggcaggctgagccggaagctgatcaacggcatccgggacaagcagtccggcaagacaatcctggatttcctgaagtccgacggcttcgccaacagaaacttcatgcagctgatccacgacgacagcctgacctttaaagaggacatccagaaagcccaggtgtccggccagggcgatagcctgcacgagcacattgccaatctggccggcagccccgccattaagaagggcatcctgcagacagtgaaggtggtggacgagctcgtgaaagtgatgggccggcacaagcccgagaacatcgtgatcgaaatggccagagagaaccagaccacccagaagggacagaagaacagccgcgagagaatgaagcggatcgaagagggcatcaaagagctgggcagccagatcctgaaagaacaccccgtggaaaacacccagctgcagaacgagaagctgtacctgtactacctgcagaatgggcgggatatgtacgtggaccaggaactggacatcaaccggctgtccgactacgatgtggaccatatcgtgcctcagagctttctgaaggacgactccatcgacaacaaggtgctgaccagaagcgacaagaaccggggcaagagcgacaacgtgccctccgaagaggtcgtgaagaagatgaagaactactggcggcagctgctgaacgccaagctgattacccagagaaagttcgacaatctgaccaaggccgagagaggcggcctgagcgaactggataaggccggcttcatcaagagacagctggtggaaacccggcagatcacaaagcacgtggcacagatcctggactcccggatgaacactaagtacgacgagaatgacaagctgatccgggaagtgaaagtgatcaccctgaagtccaagctggtgtccgatttccggaaggatttccagttttacaaagtgcgcgagatcaacaactaccaccacgcccacgacgcctacctgaacgccgtcgtgggaaccgccctgatcaaaaagtaccctaagctggaaagcgagttcgtgtacggcgactacaaggtgtacgacgtgcggaagatgatcgccaagagcgagcaggaaatcggcaaggctaccgccaagtacttcttctacagcaacatcatgaactttttcaagaccgagattaccctggccaacggcgagatccggaagcggcctctgatcgagacaaacggcgaaaccggggagatcgtgtgggataagggccgggattttgccaccgtgcggaaagtgctgagcatgccccaagtgaatatcgtgaaaaagaccgaggtgcagacaggcggcttcagcaaagagtctatcaggcccaagaggaacagcgataagctgatcgccagaaagaaggactgggaccctaagaagtacggcggcttcgtcagccccaccgtggcctattctgtgctggtggtggccaaagtggaaaagggcaagtccaagaaactgaagagtgtgaaagagctgctggggatcaccatcatggaaagaagcagcttcgagaagaatcccatcgactttctggaagccaagggctacaaagaagtgaaaaaggacctgatcatcaagctgcctaagtactccctgttcgagctggaaaacggccggaagagaatgctggcctctgccagattcctgcagaagggaaacgaactggccctgccctccaaatatgtgaacttcctgtacctggccagccactatgagaagctgaagggctcccccgaggataatgagcagaaacagctgtttgtggaacagcacaagcactacctggacgagatcatcgagcagatcagcgagttctccaagagagtgatcctggccgacgctaatctggacaaagtgctgtccgcctacaacaagcaccgggataagcccatcagagagcaggccgagaatatcatccacctgtttaccctgaccaatctgggagcccctagggccttcaagtactttgacaccaccatcgaccggaaggtgtacaggagcaccaaagaggtgctggacgccaccctgatccaccagagcatcaccggcctgtacgagacacggatcgacctgtctcagctgggaggtgactctggcggctcaaaaagaaccgccgacggcagcgaattcgagcccaagaagaagaggaaagtctaaccggtcatcatcaccatcaccattgagtttaaacccgctgatcagcctcgactgtgccttctagttgccagccatctgttgtttgcccctcccccgtgccttccttgaccctggaaggtgccactcccactgtcctttcctaataaaatgaggaaattgcatcgcattgtctgagtaggtgtcattctattctggggggtggggtggggcaggacagcaagggggaggattgggaagacaatagcaggcatgctggggatgcggtgggctctatggcttctgaggcggaaagaaccagctggggctcgataccgtcgacctctagctagagcttggcgtaatcatggtcatagctgtttcctgtgtgaaattgttatccgctcacaattccacacaacatacgagccggaagcataaagtgtaaagcctagggtgcctaatgagtgagctaactcacattaattgcgttgcgctcactgcccgctttccagtcgggaaacctgtcgtgccagctgcattaatgaatcggccaacgcgcggggagaggcggtttgcgtattgggcgctcttccgcttcctcgctcactgactcgctgcgctcggtcgttcggctgcggcgagcggtatcagctcactcaaaggcggtaatacggttatccacagaatcaggggataacgcaggaaagaacatgtgagcaaaaggccagcaaaaggccaggaaccgtaaaaaggccgcgttgctggcgtttttccataggctccgcccccctgacgagcatcacaaaaatcgacgctcaagtcagaggtggcgaaacccgacaggactataaagataccaggcgtttccccctggaagctccctcgtgcgctctcctgttccgaccctgccgcttaccggatacctgtccgcctttctcccttcgggaagcgtggcgctttctcatagctcacgctgtaggtatctcagttcggtgtaggtcgttcgctccaagctgggctgtgtgcacgaaccccccgttcagcccgaccgctgcgccttatccggtaactatcgtcttgagtccaacccggtaagacacgacttatcgccactggcagcagccactggtaacaggattagcagagcgaggtatgtaggcggtgctacagagttcttgaagtggtggcctaactacggctacactagaagaacagtatttggtatctgcgctctgctgaagccagttaccttcggaaaaagagttggtagctcttgatccggcaaacaaaccaccgctggtagcggtggtttttttgtttgcaagcagcagattacgcgcagaaaaaaaggatctcaagaagatcctttgatcttttctacggggtctgacactcagtggaacgaaaactcacgttaagggattttggtcatgagattatcaaaaaggatcttcacctagatccttttaaattaaaaatgaagttttaaatcaatctaaagtatatatgagtaaacttggtctgacagttaccaatgcttaatcagtgaggcacctatctcagcgatctgtctatttcgttcatccatagttgcctgactccccgtcgtgtagataactacgatacgggagggcttaccatctggccccagtgctgcaatgataccgcgagacccacgctcaccggctccagatttatcagcaataaaccagccagccggaagggccgagcgcagaagtggtcctgcaactttatccgcctccatccagtctattaattgttgccgggaagctagagtaagtagttcgccagttaatagtttgcgcaacgttgttgccattgctacaggcatcgtggtgtcacgctcgtcgtttggtatggcttcattcagctccggttcccaacgatcaaggcgagttacatgatcccccatgttgtgcaaaaaagcggttagctccttcggtcctccgatcgttgtcagaagtaagttggccgcagtgttatcactcatggttatggcagcactgcataattctcttactgtcatgccatccgtaagatgcttttctgtgactggtgagtactcaaccaagtcattctgagaatagtgtatgcggcgaccgagttgctcttgcccggcgtcaatacgggataataccgcgccacatagcagaactttaaaagtgctcatcattggaaaacgttcttcggggcgaaaactctcaaggatcttaccgctgttgagatccagttcgatgtaacccactcgtgcacccaactgatcttcagcatcttttactttcaccagcgtttctgggtgagcaaaaacaggaaggcaaaatgccgcaaaaaagggaataagggcgacacggaaatgttgaatactcatactcttcctttttcaatattattgaagcatttatcagggttattgtctcatgagcggatacatatttgaatgtatttagaaaaataaacaaataggggttccgcgcacatttccccgaaaagtgccacctgacgtcgacggatcgggagatcgatctcccgatcccctagggtcgactctcagtacaatctgctctgatgccgcatagttaagccagtatctgctccctgcttgtgtgttggaggtcgctgagtagtgcgcgagcaaaatttaagctacaacaaggcaaggcttgaccgacaattgcatgaagaatctgcttagggttaggcgttttgcgctgcttcgcgatgtacgggccagatatacgcgttgacattgattattgactagttattaatagtaatcaattacggggtcattagttcatagcccatatattgagttccgcgttacataacttacggtaaatggcccgcctggctgaccgcccaacgacccccgcccattgacgtcaataatgacgtatgttcccatagtaacgccaatagggactttccattgacgtcaatgggtggagtatttacggtaaactgcccacttggcagtacatcaagtgtatc

SEQ ID NO: 8 - DNA, 23 bp, Artificial Sequence
  HBG gRNA
cttgaccaatagccttgacaagg

SEQ ID NO: 9 - DNA, 26 bp, Artificial Sequence
  HBG gRNA
cactatctcaatgcaaatatctgtct

SEQ ID NO: 10 - DNA, 20 bp, Artificial Sequence
  sequenced region
cttgaccaatagccttgaca

SEQ ID NO: 11 - DNA, 20 bp, Artificial Sequence
  sequenced region
agatatttgcattgagatag

SEQ ID NO: 12 - DNA, 23 bp, Artificial Sequence
  sequenced region
ccccacaggggccctggctatgg

SEQ ID NO: 13 - DNA, 20 bp, Artificial Sequence
  sequenced region
ccccacaggggccctggcta

SEQ ID NO: 14 - protein, 364 aa, Homo sapiens
MPLLLLLPLLWAGALAMDPNFWLQVQESVTVQEGLCVLVPCTFFHPIPYYDKNSPVHGYWFREGAIISRDSPVATNKLDQEVQEETQGRFRLLGDPSRNNCSLSIVDARRRDNGSYFFRMERGSTKYSYKSPQLSVHVTDLTHRPKILIPGTLEPGHSKNLTCSVSWACEQGTPPIFSWLSAAPTSLGPRTTHSSVLIITPRPQDHGTNLTCQVKFAGAGVTTERTIQLNVTYVPQNPTTGIFPGDGSGKQETRAGVVHGAIGGAGVTALLALCLCLIFFIVKTHRRKAARTAVGRNDTHPTTGSASPKHQKKSKLHGPTETSSCSGAAPTVEMDEELHYASLNFHGMNPSKDTSTEYSEVRTQ

SEQ ID NO: 15 - DNA, 10558 bp, Homo sapiens
atgccgctgctgctactgctgcccctgctgtgggcaggtgagtggctgtggggagaggggttgtcgggctgggccgagctgaccctcgtttccccacaggggccctggctatggatccaaatttctggctgcaagtgcaggagtcagtgacggtacaggagggtttgtgcgtcctcgtgccctgcactttcttccatcccataccctactacgacaagaactccccagttcatggttactggttccgggaaggagccattatatccagggactctccagtggccacaaacaagctagatcaagaagtacaggaggagactcagggcagattccgcctccttggggatcccagtaggaacaactgctccctgagcatcgtagacgccaggaggagggataatggttcatacttctttcggatggagagaggaagtaccaaatacagttacaaatctccccagctctctgtgcatgtgacaggtgaggcacaggcttcagaagtggccgcaagggaagttcatgggtactgcagggcagggctgggatgggaccctggtactgggaggggtttaggggtaaagcctgtcgtgcttagcgggggagcttgaccagaggttgatcttctctcaggccctcacctggaccctccctcctgattctgcatcccctctttctcctcactagacttgacccacaggcccaaaatcctcatccctggcactctagaacccggccactccaaaaacctgacctgctctgtgtcctgggcctgtgagcagggaacacccccgatcttctcctggttgtcagctgcccccacctccctgggccccaggactactcactcctcggtgctcataatcaccccacggccccaggaccacggcaccaacctgacctgtcaggtgaagttcgctggagctggtgtgactacggagagaaccatccagctcaacgtcacctgtaagtgctgggccaggatgctggggtccctgagggtgtaggggagacaggatgggctggtgctggggacatttagtgtcctggaggcctggctgagttcgggagccagaaggacatgagccctgtcccttctgcatttctgtggtttctggcaggagtaaggggaaatgcctacccttatctcatctctacccccaactgaaggaaatcctctcttcctctcctagatgttccacagaacccaacaactggtatctttccaggagatggctcaggtaggaaggagcctccccgcctggggctgttactgacattgagtctgtgtcaggtttggtcagatctggactttcagagtcaaatgttcagaggcaaggcctgcagttagacacgggtagacatcaggcaccttggaaaaggatatttggggatgactagcaacttcccccttgcccatccaaataatgctctttgtctccctcctgtctctgaatgtcttggggtattttatttttaattgatatgtaataatagtacatatttatggatggcatagtgatgtttccatactaataatgtatagtaatcagatcagggtaatagcatatccatcatcttgaacatttattatttcattgttgttgggaacattcaatatcccctttctagctatttgaagctatctattattgttaagcatagtcatcctacagtggtatagaacaccagaacttattcttcctttccaggtgtaatctagtatcctttaacaaatctctctccttatcattgttcccctaaccttcccagcccttattattctctgttctactttttacttctatgaaatcaacttcttgtagcttccacttatgagtgagaacatgtggtattcaactttctgttcctagcttatttcatttaacataatgtcctctagttcaatctatgttatagtgaataacaagatttcattattttttatggctgaatgataatccattgtgtatatacgccacatttcctttatttattcatctgttgttggacacttaggtttatttcatatcttcctattgtggataatgctgcaataaacattgaggtgcagacgtttcttcaatatactgatttcctttcctttctataaatgcccagtagtggggttgctggatcatatggtagttctatttgtagttttttgagaaacttccatactcttctccatagtggttatactagtttacattctggtcaaaagtatataagagttccctcttctctacatcctcaccatcatttgttaattttcatcttttttttatcatagtcctcccaactggggtgatgttacctcattgtggttttgatttgcatttccctggtgattggtgacgttgagcatttttcatatacacttgttggccatctgtatatcttttcttgagaaatgtctactcagataatttgcccatttttaaatgagattgggtttctttgccattgagatgtatgagttcctcgtatgttctggatatgaatcacttgtcagatgaatagctgacaaatattttctcctattctgtaggttgccttttcactctgttggttgtttcctttctgcatagaagctttttagcttgatatcatctcatttatttacttttgcttttgttgcttgtgctagtgaggtcttactcataaaatatttttccagaccaatgtcctaaagcatttcccctatgtttttttctagtattttttaaattttgtgtcttatattcaggtctttgatccattttgaattgatttttgtataggacgagaggtgtgagtctaatgtcattcttctgcatatggcaccagttttcccagcatcatttattaaagaaactgctctttcctcaatgagtgttcttcatgcatttgtcaaaattcagttggctgtagatcgtggattaatttcggtgttctctattatgtattattggtgtatgtatctgcttttatgccaatatcatgctgttttggttactacagctttgtagttttgaaatctttaaatttttgaaattttgaaattttctagttttgaaattttgaaatcttgtagtgtgatacctccagctttgttcttttttgcttgggattgctttgaccattcaggctatttttagttccatatgaattttaagattgtttcctctaattctgtgaagaattacattgatattttgatagagccaggtttgaatctgtagatttctttgggtagtataatcattttagcaatattaattcatctgatgagtaaggaatgtctttccatttgtttgtatcctcttcagtttatttcctcagtgttttgtagtttttcttattaaggcttgtcacctccttggttaaatttattcctaggtatacttcattctcttatagctattgtaaatgtgattgccttcctgatttattttcagctaattcattgtgtgtagaaatgctactgatttttgtatattgattttgcatcctgcaaatttactaaattcatttatcagttctgagagttttattgttagagtctttaggtttttgttttgttttgttttgttttgttttgtttttgagatggaatttcaccatgttggccaagctggtcttgatctcctggcctcaagcaatctgcccactttggcctcctaaagtgctggaattacaggcatgagccaccacgcctggccaagtctttaggtttttgtatgttatttgcagagacaatttgacttccgcctttccagtttggatggtttttatttctttctcttgcctaattgctctggctaggactttcagtactatgtaaaataagagtcataacagtggacatccagttcctagaggaaaagatttcagcttttctccattcagtatgatgttagccatgggtttgtcatatatggccttttttgtgttgaggtactttccttctatacctaatttattgagagtttctatcatgaaacaatattgaattttaacacatgctttttattctgcaactatttaggtgatcatacggtttatgtccttcattctgttgacatatgtataacatttattgatttgcatatgttgaatcattcttgcctttctgggattaatcccactttatcatggtatgttatctttttgatgtattgttggatttgatttgctactattttgttgaatatttttgcatctatgttcatcagggatattggcctctagttttctttttttattgtctcctttctgattttggtgtcatggttatgctggccttgtagaatgagttaggaagagttgcctccacttcaattttttggaatagtttgagaagagttggcataatttttttttctttaaaggttcagtaaagttcagcactgaagccatccagccctggaattttctttgttggggggccttttattattcattcaatctcattacttgttgtttgtctgctgaagttttctataccttcttgattcaatctcggtagattatatgtgtccaggaacttatccatttcttctagactttcaaatttgttggcatattgttcatagtagtgtctaagatcctgtgtatttctgtggtaaccattgtgacatcttcttttttatttatgattttattaatttttatgtcttctgtctctttcttagtttagctaatgattgtcaattttatttatttttccaaaaagcgaacttgttcattgatttttttttaatttcatttatttctgctctgatctttatgatttctttcattgtgctgattttggatttggtttgttcttgctttctagtttcttgaaatgcacagttaaatggtttacttgaaatttgtctaattgtttgatgtaggcatttatttctctcaagttgtctcttaaaactgtttttgctgtgtcccataggttttggtatattttatttctatttttatttattttgagaaatttttaaatatcattcttaatttcttccttcactattggtcatttagaatcattttgtttcatttctgtgtatttgtatagtttgcatgtttcccttggtattgatttttagttttattcaattgtagtcaaataagatacttgatacattttggtttttaaaaatttttggcacttgttttgtgttctaacatatggtcgatccttgggaatgttgcacatgctgatgaaaccatgtgtattctgcagctgtcggttgaaatgttctgtaaatatcttaggttcatttggtatatggtgcagtttaaatccaacgtttatttgttaatcttgtctagatgatttgttcaatgctgagagtggggcgttgaagtcctcaactattattgtattggagtctatctctccctttatatctaataatatttgctttacatatctgggtgctctggtgttgtgtgcatatgtatttacagttgttatattatagtgctgaactgacccctttataataatataatgtccttctttgtctctttacagcttttgacttgtagtccgttttgtctgagataagtatagctattcctgcttcctttcatttccacttgggtagaatatctttttccatctcttccttttcagtctatgtgtgtcttctaggtgagataagtttcttgtaagcagtatatagctgtgttggtagaagggctgaggcagggcttgcttgtctgacataatgtaaaagagtcttggaacatgtcctgggtccagggtctcaaacccctcgtggcctatggaacaccaagctctgtgcctaagggtggaaggctgccctgccacactgcaatctaagcccagggcataaaacccctcgtggcttggaaagaatccagggctctgggcataaaacccctcatagcctctggaatgtgtccagacttgctggccccttgctccttgctctcccaggatcataaattgattgtatcttgagtgaaaagaacttgttctccattatttcaagtagcagagcatatgctaaaccgtcacagctatgcttgatgcaccgctacctttctaccccaaagtcctcacgttctcacttgtctatccccacttctgcacgtcctcaccacctgcttctttgtttgattaccaataaatagtgtgggctcccagagctcggggccttcacagcctccatactagcgtcggccccctggactcactttatgtactattaacttgtcttgtctcattcctttgactccgctggacttcgtggcccccacggcctagtgttggatctgatcaccccaacaagctgagtctagattttcttttcattcattcaggcagtccatatattttaaatgggacaatttaatccatttacatacacattattattaataggttattttcatttcattgattgttttctgattgttttatatattcctggttccttacttcccctcttattgtttctttttgtggttggctgatgttttttttttttttgtagtgataagatttgattcctttctctttcttctttgtgtatgggctgtcagtgagttttaagttcacgtgtttttgccttttcacttccagatgtaagactcccttgagcatttcttttctttttcttctcttatttatttttattattttttttttgagaaagtgtctcactctgtcgcccaggcaggagtgcagtggcatgatcacggctcactatagtctcgacctcctgggcttaagcaatcttcctgccttaacctcccaagtagctgggactacaggcatgtgccaccacgcccagctaatttttgtgtttcttgtagaggtagggtgttgccatttgcctaagctggtctcaaattaaagagctcaagtggtccacctgcctgccttcacctcccaatgtgctgggattataggcatgagccacactgtgcctggccccttgagcatttcttgtaaggccagtctaagagtgattagaattcccttagtttttgcttatctatgaaatattttatttctccttcttttctgaaagatagcttttctgggtatagtatttttgactgttaagttttttatctttcagtactttgagtatgtcatcccattctatcctggcctatataatgttactgctgagaaactcactgttagtctaataaggataatcctatatgtgactagatacttttaccttgctgtttttacaattctttacttgacttttgacaatttggcataatgagctttggagaggacttgcttgggttgaatattttgagagtactttgagcttcctggacctggatgtccttctagttcccaaggcttgggaagttttcacctattactggattaaatatgttttctacaccttttccattctcttctcctcctggaaataccataatgtgaatatttgcttgattgtgtcccatgagtcctgtaggtttccttcgttctattttattctcttatttttacctgcctgtgttatttcagaagatctgtcttcaagttcagaaattattttttcttcttgacctagcctgttgttgaagctctcgattgcggttttttatttcatttattgagttctcagctgtaggagttctgctttgttcttttatataatatctatctctctgttaaatttctctttcaagtcatgaattaaaacaatgggacacaggtgcccaactacttggctgacctgggggcatatctgctggaggtgccaacatggctgttttgcagggctgagatgaagctgaatgactcttggctggcctaggtgtgtttttgccaggagtagcactcagagctttatctagggtttgggatgtgagtgtaagactgctcagctggcctagggggtgtaccagccagtggtagcccatggggctgtttctcaggcctggaatgcaagcacattctgcctggggtcatgtctaaaagggttggctcacaaggctgtttctcaggccctaattgtgggagagtggcctttgggcaggccagagtcatgtccacagaaggcgtctgggcaccgtaaggctgtttctcagagcctgtgtgtgagcacataaccactaccccagcctggggatgtatcaactctttgttggctcagaggtctctcccattcaggtgagcatgcacagtagtttggccaactcaattgtgtgttcgccctgagtgggactataagacctttcctccagctggaagtacgggcagcaggggttggtttctctgctgttcagggccagagtcccagccaatcctgggcccaggctccatgcagctctaattgtggtattcagccactactgcaggtttagtggaatgaagatgcacaatgataaagaggtgcatgccactggcccccagaggagggtgcactccagagatggctgtggtctcaagatggttctgtgttgtagcagcttgcccgcaggggctggttagggagttgggagtgcacaccaaatgctccatgcagctgtgtgaattcctggcagctcttccaactgtgctcagagcttgtgaggactgtaagattaacctgtagtaaggaatgtaggtatctgcagtggcactggaggttggttggattcctctgcttatcatttccctacaaggggaaatccttcctgtctctgggacaaaccaatctgggctggggagatggagctgcaaagcccgggtgcctccatgctgccctcctgggtttccaattaccacaggtaactctccactcccttgctgcactacactactctcccttcgacactccactcaaatctttgctgtggtttattcattgccttggtcctttcttgtctggtgacacgggggaggatgagctccaggcacctccggtgagccattttgctccaatgggggcatttttttttaataggttttatttttcagagtagtttttgtttcacagcaaaattgagtggaatcttctagtcgctgatcatcttgggagcatttataaatgaaccttatttttcatgaagaaattgagcagaagatactaagacttcccgtatgccctctacccttacacatagtttccccggccatcagcatcccccatcagagtggtacatttgttacagtcaataaaactacattgacatatcattgtcacctgaagcccatagtttacattaaagttcactcttggtgttgtacattttacaggctttttaaaaatgtataatgacatgaatccaccatgagagtatcatatagaatagtcacacttccctaaaaatctctttagggcatttttttctactgtccatacctcaacccttagccctggcctctgtccaaagaccagtgctctctccactgccctattccaattaataatggcatctggcacctcagtggacagtgagcccagtgagagcaggaacagttccctcagtagtggttatcaaactgttaacaatgatgctcagagacacgcccctgactctgagtgttgggacctagaaggcacagccaggcaggtccaggagaactgtctgggtctaagaaggtctgagaaccacctccctgccccaccctgcttccaggccctttttaaggccaaaaggaccacctttgaccctaagtgatggggccagtgggaagaaagaagagacaaggcctatcagcattccagtgctttctctctctctcatccaagaggctcagagcttcacagtccttcaggggctatgtctgaggttcatttcagaaagacccagggtggagaggaacctgagtcctaggagagatgatgttttgtgcaccagagagagagggtgggacaagaggtgtcaggtgcactgtgtacttcatctcatggtcgtggtcaatattgatgtctatgatgggtgggaagatctaggagctaaaccccattttggaggtgaagtcacccctctctacatgctggagaggaggatacacatacctgtttatctagattagaattcaccccaaatcttttttgtctgcagggaaacaagagaccagagcaggagtggttcatggggccattggaggagctggtgttacagccctgctcgctctttgtctctgcctcatcttcttcatgtgagcattttctctgggtcaggcatgggccagaggtgaagaggatggacctggtgtagaagggtcctggaggggctgtgagggctggagaaagggcagggggtgtgatgatgtacagaatccagcctgtggccactgggataggcgtgggtctattccagggccctgatctcagatgtccaaggagtgggaggtagagggagaccttgtgactaagtcttgtttgagggctcctggattaatcccaccctttacctgccaaagtccctcattccaggctcataacaatggccccacagcctgagaaaaccaggctcaaagaccctggtgtctcccatcagagtgaagacccacaggaggaaagcagccaggacagcagtgggcaggaatgacacccaccctaccacagggtcagcctccccg

SEQ ID NO: 16 - protein, 6 aa, Artificial Sequence
  Gly-Ser linker
GGSGGS

SEQ ID NO: 17 - protein, 237 aa, Artificial Sequence
  CD33 deltaE2
MPLLLLLPLLWADLTHRPKILIPGTLEPGHSKNLTCSVSWACEQGTPPIFSWLSAAPTSLGPRTTHSSVLIITPRPQDHGTNLTCQVKFAGAGVTTERTIQLNVTYVPQNPTTGIFPGDGSGKQETRAGVVHGAIGGAGVTALLALCLCLIFFIVKTHRRKAARTAVGRNDTHPTTGSASPKHQKKSKLHGPTETSSCSGAAPTVEMDEELHYASLNFHGMNPSKDTSTEYSEVRTQ

SEQ ID NO: 18 - protein, 32 aa, Artificial Sequence
  linker
SGGSSGGSSGSETPGTSESATPESSGGSSGGS

SEQ ID NO: 19 - RNA, 20 nt, Artificial Sequence
  CD33E2 splice gRNA for CD33 knockdown
ccccacaggggcccuggcua

SEQ ID NO: 20 - RNA, 20 nt, Artificial Sequence
  CD33 exon 2 splice acceptor site 2 gRNA for CD33 knockdown
cccacaggggcccuggcuau

SEQ ID NO: 21 - RNA, 20 nt, Artificial Sequence
  CD33 exon 3 splice acceptor site 5a gRNA for human CD33 knockdown
ccucacuagacuugacccac

SEQ ID NO: 22 - RNA, 20 nt, Artificial Sequence
  CD33 exon 3 splice acceptor site 5b gRNA for rhesus CD33 knockdown
ucucacuagacuugacccac

SEQ ID NO: 23 - DNA, 3417 bp, Foamy retrovirus
  misc_feature (2636)..(2636): n is either A or C
  misc_feature (2807)..(2807): n is either A or C
atgaatcccctccaactgttgcagcctctgcccgcagagatcaaagggactaaactgctggctcattgggactctggagcaaccataacatgcataccagaaagcttccttgaggacgagcagcctatcaaaaaaacattgattaagacgatccacggggaaaagcagcagaacgtgtattacgttacctttaaggtgaagggccggaaagtcgaggccgaggtcattgcctctccatacgaatacattctgctctcacccaccgacgtgccatggttgacccagcagcctcttcagctgactatcctggtccctttgcaggagtaccaggaaaagattctgagcaagacggcgcttcccgaagatcagaaacagcagctgaagaccctcttcgtgaaatacgataatctctggcagcactgggaaaaccaggtgggccatcggaagattcgaccccacaatatcgccacgggcgactatccacctaggcctcagaagcagtatcccatcaacccaaaagcaaaaccaagcatccagatcgtcatcgatgatttgcttaagcaaggagtgctcaccccacaaaatagcactatgaacaccccagtgtaccccgtgcccaaaccggacggcagatggagaatggtattggactatcgcgaagttaacaaaaccatacctttgaccgcagcccagaatcaacacagcgccggcatcttggctacgatcgtgagacagaagtacaaaacaactctcgatctggccaacggcttttgggctcacccaatcactccagagagctactggcttaccgcctttacatggcaggggaaacaatactgttggacccggctgcctcaggggttcttgaattcacccgcactgtttacagctgacgtcgttgatctgctgaaagaaatccccaatgtgcaggtatacgtggacgacatctatctttcccacgacgatccaaaagagcatgttcagcagctcgaaaaagttttccagatcctgctgcaggctggttatgtcgtctcactcaagaagtctgagataggacaaaagactgtggagtttctgggatttaacatcaccaaggaaggacggggattgactgatacgttcaagactaagctgctcaacattactcctcccaaggatcttaagcagctgcagagtattcttggcttgctcaattttgcccggaattttatccctaacttcgctgagcttgttcagcccctgtataatctgatagcctccgccaagggtaagtacatcgaatggagcgaggagaatactaaacagttgaacatggtgattgaggcacttaacactgcctccaacttggaggaacgactgccagagcagcgacttgtgattaaagtgaacacctcaccaagtgcggggtacgtgcgctactacaacgagacaggcaaaaagcccataatgtacctgaactatgtcttctcaaaagctgagctcaagtttagcatgctcgagaagctgcttactaccatgcacaaggccctgataaaggccatggaccttgccatggggcaagaaatcctcgtgtacagccccatcgtttccatgacgaagatccagaaaacaccactgcccgaacgaaaggccttgcctatcagatggattacttggatgacctaccttgaggacccccgcatccagtttcattatgataagaccctgcctgaactgaaacacatcccagacgtgtacacctccagtcagtccccagtcaagcacccttctcaatatgaaggagtgttttataccgatgggagtgccatcaaatcccctgaccccacaaaaagtaacaacgccggtatgggtatcgtccacgcgacctataagcccgagtatcaggtactgaaccagtggtccatcccgctggggaatcataccgcccagatggcggaaattgccgcagtcgagtttgcctgcaaaaaggcattgaaaatcccagggcctgtcctggtcatcaccgactctttctacgtagccgagtcagccaataaggaactgccctattggaaaagtaatggcttcgtgaacaacaagaagaagccactgaaacatattagcaaatggaaatctattgccgagtgtctgtctatgaagcccgacatcactatccagcacgaaaagggccatcagcccaccaacactagtatccatacggagggaaacgctctggccgataagctagccactcaagggagttacgtcgtgaactgcaacaccaagaaacctaaccttgacgccgaattggaccaattgctgcagggacattacataaagggctaccccaagcagtatacctattttctggaagacggcaaggtaaaagtgtcccggccagagggcgtcaagatcatcccgccacaaagcgacagacagaaaatcgttctgcaggcccacaacctcgctcatactgggcgcgaagctactctgctcaagattgccaatctgtattggtggccgaatatgagaaaagacgtcgtaaagcaactggggcgctgtcagcagtgtttgatcactaacgcaagtaacaaagcaagtgggccgattcttcgaccagaccgccctcagaaaccgttcgataagttttttatagnttacattggacctctgcctcccagtcaaggctacctctacgtgctggtagtggtcgatggcatgacgggattcacatggctgtacccgaccaaggcgccgagtacttccgcgacggtcaagagccttaacgttctcacctccatagctatccccaaagttatccactccgnccagggcgcagctttcaccagctctaccttcgcggagtgggccaaagagagggggattcacttggaattctcaacgccttaccacccccaatctagcggaaaggtcgagagaaaaaattcagatatcaaaagactgttgaccaagctgcttgttggccgccctacaaagtggtatgacctcctgcctgtcgtccagctggcactgaacaacacctacagccccgtgctcaagtatacacctcatcagttgctgtttggtattgatagtaacactcctttcgcaaatcaggatacgttggatctcactcgcgaagaagagctcagtttgctgcaggagatacgcacgagtctgtaccacccttccactcctcccacttctagtaggtcttggtctccagttgtgggacagcttgttcaggaaagagtcgcccggcccgcatcactgcggccccggtggcacaaaccgtctactgtactgaaggtgctcaacccacggacggtggtaatccttgaccatctcggaaacaaccggacagtgtcaatcgataacctcaagccaacctcccaccaaaacggcacaaccaatgacacagccacaatggatcattag

SEQ ID NO: 24 - protein, 1138 aa, Foamy retrovirus
  MISC_FEATURE (879)..(879): Xaa can be Asp or Ala
  MISC_FEATURE (936)..(936): Xaa can be Asp or Ala
MNPLQLLQPLPAEIKGTKLLAHWDSGATITCIPESFLEDEQPIKKTLIKTIHGEKQQNVYYVTFKVKGRKVEAEVIASPYEYILLSPTDVPWLTQQPLQLTILVPLQEYQEKILSKTALPEDQKQQLKTLFVKYDNLWQHWENQVGHRKIRPHNIATGDYPPRPQKQYPINPKAKPSIQIVIDDLLKQGVLTPQNSTMNTPVYPVPKPDGRWRMVLDYREVNKTIPLTAAQNQHSAGILATIVRQKYKTTLDLANGFWAHPITPESYWLTAFTWQGKQYCWTRLPQGFLNSPALFTADVVDLLKEIPNVQVYVDDIYLSHDDPKEHVQQLEKVFQILLQAGYVVSLKKSEIGQKTVEFLGFNITKEGRGLTDTFKTKLLNITPPKDLKQLQSILGLLNFARNFIPNFAELVQPLYNLIASAKGKYIEWSEENTKQLNMVIEALNTASNLEERLPEQRLVIKVNTSPSAGYVRYYNETGKKPIMYLNYVFSKAELKFSMLEKLLTTMHKALIKAMDLAMGQEILVYSPIVSMTKIQKTPLPERKALPIRWITWMTYLEDPRIQFHYDKTLPELKHIPDVYTSSQSPVKHPSQYEGVFYTDGSAIKSPDPTKSNNAGMGIVHATYKPEYQVLNQWSIPLGNHTAQMAEIAAVEFACKKALKIPGPVLVITDSFYVAESANKELPYWKSNGFVNNKKKPLKHISKWKSIAECLSMKPDITIQHEKGHQPTNTSIHTEGNALADKLATQGSYVVNCNTKKPNLDAELDQLLQGHYIKGYPKQYTYFLEDGKVKVSRPEGVKIIPPQSDRQKIVLQAHNLAHTGREATLLKIANLYWWPNMRKDVVKQLGRCQQCLITNASNKASGPILRPDRPQKPFDKFFIXYIGPLPPSQGYLYVLVVVDGMTGFTWLYPTKAPSTSATVKSLNVLTSIAIPKVIHSXQGAAFTSSTFAEWAKERGIHLEFSTPYHPQSSGKVERKNSDIKRLLTKLLVGRPTKWYDLLPVVQLALNNTYSPVLKYTPHQLLFGIDSNTPFANQDTLDLTREEELSLLQEIRTSLYHPSTPPTSSRSWSPVVGQLVQERVARPASLRPRWHKPSTVLKVLNPRTVVILDHLGNNRTVSIDNLKPTSHQNGTTNDTATMDH

SEQ ID NO: 25 - DNA, 511 bp, Homo sapiens
ggggttggggttgcgccttttccaaggcagccctgggtttgcgcagggacgcggctgctctgggcgtggttccgggaaacgcagcggcgccgaccctgggtctcgcacattcttcacgtccgttcgcagcgtcacccggatcttcgccgctacccttgtgggccccccggcgacgcttcctgctccgcccctaagtcgggaaggttccttgcggttcgcggcgtgccggacgtgacaaacggaagccgcacgtctcactagtaccctcgcagacggacagcgccagggagcaatggcagcgcgccgaccgcgatgggctgtggccaatagcggctgctcagcggggcgcgccgagagcagcggccgggaaggggcggtgcgggaggcggggtgtggggcggtagtgtgggccctgttcctgcccgcgcggtgttccgcattctgcaagcctccggagcgcacgtcggcagtcggctccctcgttgaccgaatcaccgacctctctccccag

SEQ ID NO: 26 - DNA, 348 bp, Simian virus 40
ggtgtggaaagtccccaggctccccagcaggcagaagtatgcaaagcatgcatctcaattagtcagcaaccaggtgtggaaagtccccaggctccccagcaggcagaagtatgcaaagcatgcatctcaattagtcagcaaccatagtcccgcccctaactccgcccatcccgcccctaactccgcccagttccgcccattctccgccccatggctgactaattttttttatttatgcagaggccgaggccgcctctgcctctgagctattccagaagtagtgaggaggcttttttggaggcctaggcttttgcaaaaagctcccgggagcttgtatatccattttcg

SEQ ID NO: 27 - DNA, 206 bp, Artificial Sequence
  dESV40 promoter
gcatgcatctcaattagtcagcaaccatagtcccgcccctaactccgcccatcccgcccctaactccgcccagttccgcccattctccgccccatggctgactaattttttttatttatgcagaggccgaggccgcctcggcctctgagctattccagaagtagtgaggaggcttttttggaggcctaggcttttgcaaaaagctt

SEQ ID NO: 28 - DNA, 463 bp, Homo sapiens
ttggcccctccctcgggttaccccacagcctaggccgattcgacctctctccgctggggccctcgctggcgtccctgcaccctgggagcgcgagcggcgcgcgggcggggaagcgcggcccagacccccgggtccgcccggagcagctgcgctgtcggggccaggccgggctcccagtggattcgcgggcacagacgcccaggaccgcgctccccacgtggcggagggactggggacccgggcacccgtcctgccccttcaccttccagctccgcctcctccgcgcggaccccgccccgtcccgacccctcccgggtccccggcccagccccctccgggccctcccagcccctccccttcctttaccgcggccccgccctctcctcgcggcgcgagtttcaggcagcgctgcgtcctgctgcgcacgtgggaagccctggccccggccacccccgccagatct

SEQ ID NO: 29 - DNA, 648 bp, Rous sarcoma virus
acgcgtcatgtttgacagcttatcatcgcagatccgtatggtgcactctcagtacaatctgctctgatgccgcatagttaagccagtatctgctccctgcttgtgtgttggaggtcgctgagtagtgcgcgagcaaaatttaagctacaacaaggcaaggcttgaccgacaattgcatgaagaatctgcttagggttaggcgttttgcgctgcttcgcgatgtacgggccagatattcgcgtatctgaggggactagggtgtgtttaggcgaaaagcggggcttcggttgtacgcggttaggagtcccctcaggatatagtagtttcgcttttgcatagggagggggaaatgtagtcttatgcaatactcttgtagtcttgcaacatggtaacgatgagttagcaacatgccttacaaggagagaaaaagcaccgtgcatgccgattggtggaagtaaggtggtacgatcgtgccttattaggaaggcaacagacgggtctgacatggattggacgaaccactaaattccgcattgcagagatattgtatttaagtgcctagctcgatacaataaacgccatttgaccattcaccacattggtgtgcacctccaagctgggtaccagctgctagcaagcttgagatct

SEQ ID NO: 30 - DNA, 1740 bp, Homo sapiens
gagtagctgggattacaggcatgtgccaccacgcctcgctaatattagtatttttcatacagacaagatctcactatgttgctcagggtagtctcgaattctgggactcaaatgatcctcccacttcagcctcccaaagtgctgggattacaggcataagccatcatgcccggcctctgacgctgtttctttcaacccccaggatttcagattccaccagcttatggagaagggaaccaagttcgagatgcgtgattgcccagaaagttggaggctgagctgagacttgaacccagagaccagaacctccagaggtcaaagtcctcctcctgggtcccccagagaagggccctgagatgacagctcgttggtcctcatggaagcgtgacccccccagtagactttctcccacacccaaccttggtttcctcatctatatgatagggacaagccagactctacctccctggtggtcatggtctccgcttattcgggttcataaccttaaaggcccctcgcaccacctcagtgagccatttatgcctggcacagggccaactctcagtgcatatctgcaaaggaaccaatgaatgagtgaatgaagtgacaaatgaataaaggaataaatgaatgaggcacttatcatgtaccaggctttcgttaccacgtcccatttattcctctgaggcagggtctattttatccttgttacagatggggaaactaaggcccagggaggagcaaagtcttccccaagtatgtacccactcagaacttgagctctgaatgtctcccacccagcttagcccaagagcggggttcagtgatgcccaccccctaaggctctagagaaagggggtaggcccacatgccagtttgggggtggtaaagccaggtaagttttctttatgggtcccctgaaaccctgaaagtgaaccccagtcctgcatgaaagtgagctccccatagctcaaggtattcaagcacaatacggctttgagtgctgaagcaggctgtgcaggcttggatagtgacatgccctctctgagcctcaatttccccacctgtcaacagcagacagtgacagctgtgatcaggggatcacagtgcatggggatgggtgggtgcatggggatggaggggcatttgggagccctccccgataccaccccctgcagccacccagatagcctgtcctggcctgtctgtcccagtccagggctgaaagggtgcgggtcctgcccgcccctaggtctggaggcggagtcgcggtgacccgggagcccaataaatctgcaacccacaatcacgagctgctcccgtaagccccaaggcgacctccagctgtcagcgctgagcacagcgcccagggagagggacagacagccggctgcatgggacagcggaacccagagtgagaggggaggtggcaggacagacagacagcaggggcggacgcagagacagacagcggggacagggaggccgacacggacatcgacagcccatagattcctaacccagggagccccggcccctctcgccgcttcccaccccagacggagcggggacaggctgccgagcatcctcccacccgccctccccgtcctgcctcctcggcccctgccagcttcccccgcttgagcacgcagggcgtccgaggacgcgctgggcctccgcacccgccctcatggaggccgtggagaccggggaacggcccaccttcggagcctgggacta

SEQ ID NO: 31 - DNA, 1075 bp, Homo sapiens
attagagattgtaaattgggctctgagcttcctaccaacaaaagcacaaaggaaaatatgatcactggtattaaaaaaaaacacctatggtttccaaaagattaaaacaaaccagcagttttatagaagctaacactaaaatctaaaggaactacgttctatggagccacttaatatggataaacactttgacaatattctttcaacaactacagtaacaagtttcttagagtccatttctttttacatccataatgaattgtaaatcttttctacttcttaagtaaaacatcaccacttaattctggtaacttttccatattaactttttagaacaattgcaaacgtaccataaatgattgttgtcacagtggtaactatttgaccctgactgttattttgtatatagcagcttttaaaataaaaaggcaacaagtttctaggcgtaatttccacagatcttttatgtaaaacaatgacatcctttgcaacttctgccatttaatctatctcaagcaagctctctggaaacaaatctatttgaaagattctattgtaattagaaatcagggtaactgaatgcactagatgaaaaccttctgactggggccaatgaagtcaataaagtcaaaactgctgtgaatgctcaactgtctgcagatcagatgtcttgggatggaatccgttctcgaggccaccatcattaatatcaatttggccatgtaatacaagcctcacttgttccactgttacaaatgtgcttaaaactgagctcatttacaatccaaatacatatgtaggatggtaaccaaggcatcacactaatttaggtattatgttttagggggaacaaaaggtatgttaatattttattcatctccaaattaactataaattgtgcattcttgcatagatcctccttgggaatgagaaattaggaaaatccagttgttaaaatgaatgcctaaaatcaaaataaaatttgtttttctggcacctgcttgatgacacagactaataaccaatgacaaaattcccttgaacccaagttttcatttcctcctattgtgtggtc

SEQ ID NO: 32 - protein, 133 aa, Artificial Sequence
  Light chain of hP67.6
MSVPTQVLGLLLLWLTDARCDIQLTQSPSTLSASVGDRVTITCRASESLDNYGIRFLTWFQQKPGKAPKLLMYAASNQGSGVPSRFSGSGSGTEFTLTISSLQPDDFATYYCQQTKEVPWSFGQGTKVEVKRT

SEQ ID NO: 33 - protein, 141 aa, Artificial Sequence
  Heavy chain of hP67.6
MEWSWVFLFFLSVTTGVHSEVQLVQSGAEVKKPGSSVKVSCKASGYTITDSNIHWVRQAPGQSLEWIGYIYPYNGGTDYNQKFKNRATLTVDNPTNTAYMELSSLRSEDTDFYYCVNGNPWLAYWGQGTLVTVSSASTKGP

SEQ ID NO: 34 - protein, 10 aa, Artificial Sequence
  CDRL1 of hP67.6 binding domain
QSPSTLSASV

SEQ ID NO: 35 - protein, 16 aa, Artificial Sequence
  CDRL2 of hP67.6 binding domain
DNYGIRFLTWFQQKPG

SEQ ID NO: 36 - protein, 8 aa, Artificial Sequence
  CDRL3 of hP67.6 binding domain
FTLTISSL

SEQ ID NO: 37 - protein, 11 aa, Artificial Sequence
  CDRH1 of hP67.6 binding domain
VQSGAEVKKPG

SEQ ID NO: 38 - protein, 7 aa, Artificial Sequence
  CDRLH2 of hP67.6 binding domain
DSNIHWV

SEQ ID NO: 39 - protein, 9 aa, Artificial Sequence
  CDRH3 of hP67.6 binding domain
LTVDNPTNT

SEQ ID NO: 40 - protein, 5 aa, Artificial Sequence
  CDRL1 of h2H12EC binding domain
NYDIN

SEQ ID NO: 41 - protein, 17 aa, Artificial Sequence
  CDRL2 of h2H12EC binding domain
WIYPGDGSTKYNEKFKA

SEQ ID NO: 42 - protein, 8 aa, Artificial Sequence
  CDRL3 of h2H12EC binding domain
GYEDAMDY

SEQ ID NO: 43 - protein, 11 aa, Artificial Sequence
  CDRH1 of h2H12EC binding domain
KASQDINSYLS

SEQ ID NO: 44 - protein, 7 aa, Artificial Sequence
  CDRH2 of h2H12EC binding domain
RANRLVD

SEQ ID NO: 45 - protein, 9 aa, Artificial Sequence
  CDRH3 of h2H12EC binding domain
LQYDEFPLT

SEQ ID NO: 46 - protein, 113 aa, Artificial Sequence
  Light chain of anti-CD33 antibody
NIMLTQSPSSLAVSAGEKVTMSCKSSQSVFFSSSQKNYLAWYQQIPGQSPKLLIYWASTRESGVPDRFTGSGSGTDFTLTISSVQSEDLAIYYCHQYLSSRTFGGGTKLEIKR

SEQ ID NO: 47 - protein, 118 aa, Artificial Sequence
  Heavy chain of anti-CD33 antibody
QVQLQQPGAEVVKPGASVKMSCKASGYTFTSYYIHWIKQTPGQGLEWVGVIYPGNDDISYNQKFKGKATLTADKSSTTAYMQLSSLTSEDSAVYYCAREVRLRYFDVWGAGTTVTVSS

SEQ ID NO: 48 - protein, 17 aa, Artificial Sequence
  CDRL2 for CD33 binding domain
  MISC_FEATURE (16)..(16): Xaa repesents a Lys or a Gln
VIYPGNDDISYNQKFXG

SEQ ID NO: 49 - protein, 9 aa, Artificial Sequence
  CDRL3 for CD33 binding domain
EVRLRYFDV

SEQ ID NO: 50 - protein, 17 aa, Artificial Sequence
  CDRH1 for CD33 binding domain
KSSQSVFFSSSQKNYLA

SEQ ID NO: 51 - protein, 7 aa, Artificial Sequence
  CDRH2 for CD33 binding domain
WASTRES

SEQ ID NO: 52 - protein, 8 aa, Artificial Sequence
  CDRH3 for CD33 binding domain
HQYLSSRT

SEQ ID NO: 53 - protein, 5 aa, Artificial Sequence
  Gly-Ser Linker
  MISC_FEATURE (1)..(5): (Gly Gly Gly Gly Ser) is repeated n times, wherein n is an integer of 1, 2, 3, 4, 5, 6, 7, 8, 9 or 10
GGGGS

SEQ ID NO: 54 - protein, 9 aa, Artificial Sequence
  Gly-Ser Linker
  MISC_FEATURE (1)..(4): (Gly Gly Gly Ser) is repeated n times, wherein n is an integer of 1, 2, 3, 4, 5, 6, 7, 8, 9 or 10
  MISC_FEATURE (5)..(9): (Gly Gly Gly Gly Ser) is repeated n times, wherein n is an integer of 1, 2, 3, 4, 5, 6, 7, 8, 9 or 10
GGGSGGGGS

SEQ ID NO: 55 - protein, 7 aa, Artificial Sequence
  Gly-Ser Linker
  MISC_FEATURE (1)..(4): (Gly Gly Gly Ser) is repeated n times, wherein n is an integer of 1, 2, 3, 4, 5, 6, 7, 8, 9 or 10
  MISC_FEATURE (5)..(7): (Gly Gly Ser) is repeated n times, wherein n is an integer of 1, 2, 3, 4, 5, 6, 7, 8, 9 or 10
GGGSGGS

SEQ ID NO: 56 - protein, 9 aa, Artificial Sequence
  Gly-Ser Linker
  MISC_FEATURE (1)..(4): (Gly Gly Gly Ser) is repeated n times, wherein n is an integer of 1, 2, 3, 4, 5, 6, 7, 8, 9 or 10
GGGSGGGGS

SEQ ID NO: 57 - protein, 20 aa, Artificial Sequence
  Gly-Ser Linker
GGGGSGGGGSGGGGSGGGGS

SEQ ID NO: 58 - protein, 15 aa, Artificial Sequence
  Gly-Ser Linker
GGGGSGGGGSGGGGS

SEQ ID NO: 59 - protein, 10 aa, Artificial Sequence
  Gly-Ser Linker
GGGGSGGGGS

SEQ ID NO: 60 - protein, 5 aa, Artificial Sequence
  Gly-Ser Linker
GGGGS

SEQ ID NO: 61 - protein, 8 aa, Artificial Sequence
  Gly-Ser Linker
GGGSGGGS

SEQ ID NO: 62 - protein, 4 aa, Artificial Sequence
  Gly-Ser Linker
GGGS

SEQ ID NO: 63 - protein, 11 aa, Artificial Sequence
  Gly-Ser Linker
GGSGGGSGGSG

SEQ ID NO: 64 - protein, 10 aa, Artificial Sequence
  Gly-Ser Linker
GGSGGGSGSG

SEQ ID NO: 65 - protein, 8 aa, Artificial Sequence
  Gly-Ser Linker
GGSGGGSG

SEQ ID NO: 66 - protein, 5 aa, Artificial Sequence
  Linker
  MISC_FEATURE (1)..(5): The entire sequence can be repeated n times, wherein n is an integer including 1, 2, 3, 4, 5, 6, 7, 8, 9, or more
EAAAK

SEQ ID NO: 67 - protein, 10 aa, Artificial Sequence
  CDRL1 of CD3 T-cell activating epitope binding domain
SASSSVSYMN

SEQ ID NO: 68 - protein, 11 aa, Artificial Sequence
  CDRL2 of CD3 T-cell activating epitope binding domain
RWIYDTSKLAS

SEQ ID NO: 69 - protein, 9 aa, Artificial Sequence
  CDRL3 of CD3 T-cell activating epitope binding domain
QQWSSNPFT

SEQ ID NO: 70 - protein, 13 aa, Artificial Sequence
  CDRH1 of CD3 T-cell activating epitope binding domain
KASGYTFTRYTMH

SEQ ID NO: 71 - protein, 16 aa, Artificial Sequence
  CDRH2 of CD3 T-cell activating epitope binding domain
INPSRGYTNYNQKFKD

SEQ ID NO: 72 - protein, 10 aa, Artificial Sequence
  CDRH3 of CD3 T-cell activating epitope binding domain
YYDDHYCLDY

SEQ ID NO: 73 - protein, 242 aa, Artificial Sequence
  OKT3 scFv
QVQLQQSGAELARPGASVKMSCKASGYTFTRYTMHWVKQRPGQGLEWIGYINPSRGYTNYNQKFKDKATLTTDKSSSTAYMQLSSLTSEDSAVYYCARYYDDHYCLDYWGQGTTLTVSSSGGGGSGGGGSGGGGSQIVLTQSPAIMSASPGEKVTMTCSASSSVSYMNWYQQKSGTSPKRWIYDTSKLASGVPAHFRGSGSGTSYSLTISGMEAEDAATYYCQQWSSNPFTFGSGTKLEINR

SEQ ID NO: 74 - protein, 11 aa, Artificial Sequence
  CDRL1 of 20G6-F3 antibody
QSLVHNNGNTY

SEQ ID NO: 75 - protein, 9 aa, Artificial Sequence
  CDR31 of 20G6-F3 antibody
GQGTQYPFT

SEQ ID NO: 76 - protein, 8 aa, Artificial Sequence
  CDRH1 of 20G6-F3 antibody
GFTFTKAW

SEQ ID NO: 77 - protein, 10 aa, Artificial Sequence
  CDRH2 of 20G6-F3 antibody
IKDKSNSYAT

SEQ ID NO: 78 - protein, 12 aa, Artificial Sequence
  CDRH3 of 20G6-F3 antibody
RGVYYALSPFDY

SEQ ID NO: 79 - protein, 11 aa, Artificial Sequence
  CDRL1 of 4B4-D7 antibody
QSLVHDNGNTY

SEQ ID NO: 80 - protein, 229 aa, Artificial sequence [sequence omitted]

SEQ ID NO: 81 - protein, 8 aa, Artificial Sequence
  CDRH1 of 4B4-D7 or 4E7-C9 antibody
GFTFSNAW

SEQ ID NO: 82 - protein, 10 aa, Artificial Sequence
  CDRH2 of 4B4-D7 antibody
IKARSNNYAT

SEQ ID NO: 83 - protein, 12 aa, Artificial Sequence
  CDRH3 of 4B4-D7 antibody
RGTYYASKPFDY

SEQ ID NO: 84 - protein, 11 aa, Artificial Sequence
  CDRL1 of 4E7-C9 antibody
QSLEHNNGNTY

SEQ ID NO: 85 - protein, 236 aa, Homo sapiens
MTSEKGPSTGDPTLRRRIEPWEFDVFYDPRELRKEACLLYEIKWGMSRKIWRSSGKNTTNHVEVNFIKKFTSERDFHPSMSCSITWFLSWSPCWECSQAIREFLSRHPGVTLVIYVARLFWHMDQQNRQGLRDLVNSGVTIQIMRASEYYHCWRNFVNYPPGDEAHWPQYPPLWMMLYALELHCIILSLPPCLKISRRWQNHLTFFRLHLQNCHYQTIPPHILLATGLIHPSVAWR

SEQ ID NO: 86 - protein, 208 aa, Petromyzon marinus
MTDAEYVRIHEKLDIYTFKKQFFNNKKSVSHRCYVLFELKRRGERRACFWGYAVNKPQSGTERGIHAEIFSIRKVEEYLRDNPGQFTINWYSSWSPCADCAEKILEWYNQELRGNGHTLKIWACKLYYEKNARNQIGLWNLRDNGVGLNVMVSEHYQCCRKIFIQSSHNQLNENRWLEKTLKRAEKRRSELSIMIQVKILHTTKSPAV

SEQ ID NO: 87 - protein, 10 aa, Artificial Sequence
  CDRH2 of 4E7-C9 antibody
IKDKSNNYAT

SEQ ID NO: 88 - protein, 13 aa, Artificial Sequence
  CDRH3 of 4E7-C9 antibody
RYVHYGIGYAMDA

SEQ ID NO: 89 - protein, 11 aa, Artificial Sequence
  CDRL1 of 18F5-H10 antibody
QSLVHTNGNTY

SEQ ID NO: 90 - protein, 9 aa, Artificial Sequence
  CDRL3 of 18F5-H10 antibody
GQGTHYPFT

SEQ ID NO: 91 - protein, 8 aa, Artificial Sequence
  CDRH1 of 18F5-H10 antibody
GFTFTNAW

SEQ ID NO: 92 - protein, 9 aa, Artificial Sequence
  CDRH2 of 18F5-H10 antibody
KDKSNNYAT

SEQ ID NO: 93 - protein, 13 aa, Artificial Sequence
  CDRH3 of 18F5-H10 antibody
RYVHYRFAYALDA

SEQ ID NO: 94 - protein, 120 aa, Artificial Sequence
  Variable heavy chain of TGN1412
QVQLVQSGAEVKKPGASVKVSCKASGYTFTSYYIHWVRQAPGQGLEWIGCIYPGNVNTNYNEKFKDRATLTVDTSISTAYMELSRLRSDDTAVYFCTRSHYGLDWNFDVWGQGTTVTVSS

SEQ ID NO: 95 - protein, 107 aa, Artificial Sequence
  Variable light chain of TGN1412
DIQMTQSPSSLSASVGDRVTITCHASQNIYVWLNWYQQKPGKAPKLLIYKASNLHTGVPSRFSGSGSGTDFTLTISSLQPEDFATYYCQQGQTYPYTFGGGTKVEIK

SEQ ID NO: 96 - protein, 11 aa, Artificial Sequence
  CDRL1 of CD28 binding domain
HASQNIYVWLN

SEQ ID NO: 97 - protein, 7 aa, Artificial Sequence
  CDRL2 of CD28 binding domain
KASNLHT

SEQ ID NO: 98 - protein, 9 aa, Artificial Sequence
  CDRL3 of CD28 binding domain
QQGQTYPYT

SEQ ID NO: 99 - protein, 10 aa, Artificial Sequence
  CDRH1 of CD28 binding domain
GYTFTSYYIH

SEQ ID NO: 100 - protein, 14 aa, Artificial Sequence
  CDRH2 of CD28 binding domain
CIYPGNVNTNYNEK

SEQ ID NO: 101 - protein, 11 aa, Artificial Sequence
  CDRH3 of CD28 binding domain
SHYGLDWNFDV

SEQ ID NO: 102 - protein, 384 aa, Homo sapiens
MKPHFRNTVERMYRDTFSYNFYNRPILSRRNTVWLCYEVKTKGPSRPPLDAKIFRGQVYSELKYHPEMRFFHWFSKWRKLHRDQEYEVTWYISWSPCTKCTRDMATFLAEDPKVTLTIFVARLYYFWDPDYQEALRSLCQKRDGPRATMKIMNYDEFQHCWSKFVYSQRELFEPWNNLPKYYILLHIMLGEILRHSMDPPTFTFNFNNEPWVRGRHETYLCYEVERMHNDTWVLLNQRRGFLCNQAPHKHGFLEGRHAELCFLDVIPFWKLDLDQDYRVTCFTSWSPCFSCAQEMAKFISKNKHVSLCIFTARIYDDQGRCQEGLRTLAEAGAKISIMTYSEFKHCWDTFVDHQGCPFQPWDGLDEHSQDLSGRLRAILQNQEN

SEQ ID NO: 103 - protein, 384 aa, Homo sapiens
MKPHFRNTVERMYRDTFSYNFYNRPILSRRNTVWLCYEVKTKGPSRPPLDAKIFRGQVYSELKYHPEMRFFHWFSKWRKLHRDQEYEVTWYISWSPCTKCTRDMATFLAEDPKVTLTIFVARLYYFWDPDYQEALRSLCQKRDGPRATMKIMNYDEFQHCWSKFVYSQRELFEPWNNLPKYYILLHIMLGEILRHSMDPPTFTFNFNNEPWVRGRHETYLCYEVERMHNDTWVLLNQRRGFLCNQAPHKHGFLEGRHAELCFLDVIPFWKLDLDQDYRVTCFTSWSPCFSCAQEMAKFISKNKHVSLCIFTARIYRRQGRCQEGLRTLAEAGAKISIMTYSEFKHCWDTFVDHQGCPFQPWDGLDEHSQDLSGRLRAILQNQEN

SEQ ID NO: 104 - protein, 184 aa, Homo sapiens
MDPPTFTFNFNNEPWVRGRHETYLCYEVERMHNDTWVLLNQRRGFLCNQAPHKHGFLEGRHAELCFLDVIPFWKLDLDQDYRVTCFTSWSPCFSCAQEMAKFISKNKHVSLCIFTARIYDDQGRCQEGLRTLAEAGAKISIMTYSEFKHCWDTFVDHQGCPFQPWDGLDEHSQDLSGRLRAILQ

SEQ ID NO: 105 - protein, 5 aa, Artificial Sequence
  CDRH1 of CD28 binding domain
SYYIH

SEQ ID NO: 106 - protein, 17 aa, Artificial Sequence
  CDRH2 of CD28 binding domain
CIYPGNVNTNYNEKFKD

SEQ ID NO: 107 - protein, 184 aa, Homo sapiens
MDPPTFTFNFNNEPWVRGRHETYLCYEVERMHNDTWVLLNQRRGFLCNQAPHKHGFLEGRHAELCFLDVIPFWKLDLDQDYRVTCFTSWSPCFSCAQEMAKFISKNKHVSLCIFTARIYRRQGRCQEGLRTLAEAGAKISIMTYSEFKHCWDTFVDHQGCPFQPWDGLDEHSQDLSGRLRAILQ

SEQ ID NO: 108 - protein, 7 aa, Artificial Sequence
  CDRL1 of 4-1BB binding domain
RASQSVS

SEQ ID NO: 109 - protein, 6 aa, Artificial Sequence
  CDRL2 of 4-1BB binding domain
ASNRAT

SEQ ID NO: 110 - protein, 10 aa, Artificial Sequence
  CDRL3 of 4-1BB binding domain
QRSNWPPALT

SEQ ID NO: 111 - protein, 4 aa, Artificial Sequence
  CDRH1 of 4-1BB binding domain
YYWS

SEQ ID NO: 112 - protein, 12 aa, Artificial Sequence
  CDRH3 of 4-1BB binding domain
YGPGNYDWYFDL

SEQ ID NO: 113 - protein, 11 aa, Artificial Sequence
  CDRL1 of 4-1BB binding domain
SGDNIGDQYAH

SEQ ID NO: 114 - protein, 7 aa, Artificial Sequence
  CDRL2 of 4-1BB binding domain
QDKNRPS

SEQ ID NO: 115 - protein, 11 aa, Artificial Sequence
  CDRL3 of 4-1BB binding domain
ATYTGFGSLAV

SEQ ID NO: 116 - protein, 10 aa, Artificial Sequence
  CDRH1 of 4-1BB binding domain
GYSFSTYWIS

SEQ ID NO: 117 - protein, 14 aa, Artificial Sequence
  CDRH2 of 4-1BB binding domain
KIYPGDSYTNYSPS

SEQ ID NO: 118 - protein, 7 aa, Artificial Sequence
  CDRH3 of 4-1BB binding domain
GYGIFDY

SEQ ID NO: 119 - protein, 11 aa, Artificial Sequence
  CDRL1 of OKT8 antibody
RTSRSISQYLA

SEQ ID NO: 120 - protein, 7 aa, Artificial Sequence
  CDRL2 of OKT8 antibody
SGSTLQS

SEQ ID NO: 121 - protein, 9 aa, Artificial Sequence
  CDRL3 of OKT8 antibody
QQHNENPLT

SEQ ID NO: 122 - protein, 6 aa, Artificial Sequence
  CDRH1 of OKT8 antibody
GFNIKD

SEQ ID NO: 123 - protein, 9 aa, Artificial Sequence
  CDRH2 of OKT8 antibody
RIDPANDNT

SEQ ID NO: 124 - protein, 9 aa, Artificial Sequence
  CDRH3 of OKT8 antibody
GYGYYVFDH

SEQ ID NO: 125 - protein, 109 aa, Artificial Sequence
  Variable light chain to KIR2DL1 and KIR2DL2/3 binding domain
EIVLTQSPVTLSLSPGERATLSCRASQSVSSYLAWYQQKPGQAPRLLIYDASNRATGIPARFSGSGSGTDFTLTISSLEPEDFAVYYCQQRSNWMYTFGQGTKLEIKRT

SEQ ID NO: 126 - protein, 123 aa, Artificial Sequence
  Variable heavy chain to KIR2DL1 and KIR2DL2/3 binding domain
QVQLVQSGAEVKKPGSSVKVSCKASGGTFSFYAISWVRQAPGQGLEWMGGFIPIFGAANYAQKFQGRVTITADESTSTAYMELSSLRSDDTAVYYCARIPSGSYYYDYDMDVWGQGTTVTVSS

SEQ ID NO: 127 - protein, 6 aa, Artificial Sequence
  His tag
HHHHHH

SEQ ID NO: 128 - protein, 8 aa, Artificial Sequence
  Flag tag
DYKDDDDK

SEQ ID NO: 129 - protein, 8 aa, Artificial Sequence
  Xpress tag
DLYDDDDK

SEQ ID NO: 130 - protein, 15 aa, Artificial Sequence
  Avi tag
GLNDIFEAQKIEWHE

SEQ ID NO: 131 - protein, 26 aa, Artificial Sequence
  Calmodulin tag
KRRWKKNFIAVSAANRFKKISSSGAL

SEQ ID NO: 132 - protein, 9 aa, Artificial Sequence
  HA tag
YPYDVPDYA

SEQ ID NO: 133 - protein, 10 aa, Artificial Sequence
  Myc tag
EQKLISEEDL

SEQ ID NO: 134 - protein, 13 aa, Artificial Sequence
  Softag 1
SLAELLNAGLGGS

SEQ ID NO: 135 - protein, 8 aa, Artificial Sequence
  Softag 3
TQDPSRVG

SEQ ID NO: 136 - protein, 14 aa, Artificial Sequence
  V5 tag
GKPIPNPLLGLDST

SEQ ID NO: 137 - RNA, 20 nt, Artificial Sequence
  HBG-113 (ABE8e gRNA target)
cuugaccaauagccuugaca

SEQ ID NO: 138 - RNA, 20 nt, Artificial Sequence
  HBG-175 (ABE8e gRNA target)
agauauuugcauugagauag

SEQ ID NO: 139 - DNA, 8961 bp, Artificial Sequence
  pCMV_BE4max
atatgccaagtacgccccctattgacgtcaatgacggtaaatggcccgcctggcattatgcccagtacatgaccttatgggactttcctacttggcagtacatctacgtattagtcatcgctattaccatggtgatgcggttttggcagtacatcaatgggcgtggatagcggtttgactcacggggatttccaagtctccaccccattgacgtcaatgggagtttgttttggcaccaaaatcaacgggactttccaaaatgtcgtaacaactccgccccattgacgcaaatgggcggtaggcgtgtacggtgggaggtctatataagcagagctggtttagtgaaccgtcagatccgctagagatccgcggccgctaatacgactcactatagggagagccgccaccatgaaacggacagccgacggaagcgagttcgagtcaccaaagaagaagcggaaagtctcctcagagactgggcctgtcgccgtcgatccaaccctgcgccgccggattgaacctcacgagtttgaagtgttctttgacccccgggagctgagaaaggagacatgcctgctgtacgagatcaactggggaggcaggcactccatctggaggcacacctctcagaacacaaataagcacgtggaggtgaacttcatcgagaagtttaccacagagcggtacttctgccccaataccagatgtagcatcacatggtttctgagctggtccccttgcggagagtgtagcagggccatcaccgagttcctgtccagatatccacacgtgacactgtttatctacatcgccaggctgtatcaccacgcagacccaaggaataggcagggcctgcgcgatctgatcagctccggcgtgaccatccagatcatgacagagcaggagtccggctactgctggcggaacttcgtgaattattctcctagcaacgaggcccactggcctaggtacccacacctgtgggtgcgcctgtacgtgctggagctgtattgcatcatcctgggcctgcccccttgtctgaatatcctgcggagaaagcagccccagctgaccttctttacaatcgccctgcagtcttgtcactatcagaggctgccaccccacatcctgtgggccacaggcctgaagtctggaggatctagcggaggatcctctggcagcgagacaccaggaacaagcgagtcagcaacaccagagagcagtggcggcagcagcggcggcagcgacaagaagtacagcatcggcctggccatcggcaccaactctgtgggctgggccgtgatcaccgacgagtacaaggtgcccagcaagaaattcaaggtgctgggcaacaccgaccggcacagcatcaagaagaacctgatcggagccctgctgttcgacagcggcgaaacagccgaggccacccggctgaagagaaccgccagaagaagatacaccagacggaagaaccggatctgctatctgcaagagatcttcagcaacgagatggccaaggtggacgacagcttcttccacagactggaagagtccttcctggtggaagaggataagaagcacgagcggcaccccatcttcggcaacatcgtggacgaggtggcctaccacgagaagtaccccaccatctaccacctgagaaagaaactggtggacagcaccgacaaggccgacctgcggctgatctatctggccctggcccacatgatcaagttccggggccacttcctgatcgagggcgacctgaaccccgacaacagcgacgtggacaagctgttcatccagctggtgcagacctacaaccagctgttcgaggaaaaccccatcaacgccagcggcgtggacgccaaggccatcctgtctgccagactgagcaagagcagacggctggaaaatctgatcgcccagctgcccggcgagaagaagaatggcctgttcggaaacctgattgccctgagcctgggcctgacccccaacttcaagagcaacttcgacctggccgaggatgccaaactgcagctgagcaaggacacctacgacgacgacctggacaacctgctggcccagatcggcgaccagtacgccgacctgtttctggccgccaagaacctgtccgacgccatcctgctgagcgacatcctgagagtgaacaccgagatcaccaaggcccccctgagcgcctctatgatcaagagatacgacgagcaccaccaggacctgaccctgctgaaagctctcgtgcggcagcagctgcctgagaagtacaaagagattttcttcgaccagagcaagaacggctacgccggctacattgacggcggagccagccaggaagagttctacaagttcatcaagcccatcctggaaaagatggacggcaccgaggaactgctcgtgaagctgaacagagaggacctgctgcggaagcagcggaccttcgacaacggcagcatcccccaccagatccacctgggagagctgcacgccattctgcggcggcaggaagatttttacccattcctgaaggacaaccgggaaaagatcgagaagatcctgaccttccgcatcccctactacgtgggccctctggccaggggaaacagcagattcgcctggatgaccagaaagagcgaggaaaccatcaccccctggaacttcgaggaagtggtggacaagggcgcttccgcccagagcttcatcgagcggatgaccaacttcgataagaacctgcccaacgagaaggtgctgcccaagcacagcctgctgtacgagtacttcaccgtgtataacgagctgaccaaagtgaaatacgtgaccgagggaatgagaaagcccgccttcctgagcggcgagcagaaaaaggccatcgtggacctgctgttcaagaccaaccggaaagtgaccgtgaagcagctgaaagaggactacttcaagaaaatcgagtgcttcgactccgtggaaatctccggcgtggaagatcggttcaacgcctccctgggcacataccacgatctgctgaaaattatcaaggacaaggacttcctggacaatgaggaaaacgaggacattctggaagatatcgtgctgaccctgacactgtttgaggacagagagatgatcgaggaacggctgaaaacctatgcccacctgttcgacgacaaagtgatgaagcagctgaagcggcggagatacaccggctggggcaggctgagccggaagctgatcaacggcatccgggacaagcagtccggcaagacaatcctggatttcctgaagtccgacggcttcgccaacagaaacttcatgcagctgatccacgacgacagcctgacctttaaagaggacatccagaaagcccaggtgtccggccagggcgatagcctgcacgagcacattgccaatctggccggcagccccgccattaagaagggcatcctgcagacagtgaaggtggtggacgagctcgtgaaagtgatgggccggcacaagcccgagaacatcgtgatcgaaatggccagagagaaccagaccacccagaagggacagaagaacagccgcgagagaatgaagcggatcgaagagggcatcaaagagctgggcagccagatcctgaaagaacaccccgtggaaaacacccagctgcagaacgagaagctgtacctgtactacctgcagaatgggcgggatatgtacgtggaccaggaactggacatcaaccggctgtccgactacgatgtggaccatatcgtgcctcagagctttctgaaggacgactccatcgacaacaaggtgctgaccagaagcgacaagaaccggggcaagagcgacaacgtgccctccgaagaggtcgtgaagaagatgaagaactactggcggcagctgctgaacgccaagctgattacccagagaaagttcgacaatctgaccaaggccgagagaggcggcctgagcgaactggataaggccggcttcatcaagagacagctggtggaaacccggcagatcacaaagcacgtggcacagatcctggactcccggatgaacactaagtacgacgagaatgacaagctgatccgggaagtgaaagtgatcaccctgaagtccaagctggtgtccgatttccggaaggatttccagttttacaaagtgcgcgagatcaacaactaccaccacgcccacgacgcctacctgaacgccgtcgtgggaaccgccctgatcaaaaagtaccctaagctggaaagcgagttcgtgtacggcgactacaaggtgtacgacgtgcggaagatgatcgccaagagcgagcaggaaatcggcaaggctaccgccaagtacttcttctacagcaacatcatgaactttttcaagaccgagattaccctggccaacggcgagatccggaagcggcctctgatcgagacaaacggcgaaaccggggagatcgtgtgggataagggccgggattttgccaccgtgcggaaagtgctgagcatgccccaagtgaatatcgtgaaaaagaccgaggtgcagacaggcggcttcagcaaagagtctatcctgcccaagaggaacagcgataagctgatcgccagaaagaaggactgggaccctaagaagtacggcggcttcgacagccccaccgtggcctattctgtgctggtggtggccaaagtggaaaagggcaagtccaagaaactgaagagtgtgaaagagctgctggggatcaccatcatggaaagaagcagcttcgagaagaatcccatcgactttctggaagccaagggctacaaagaagtgaaaaaggacctgatcatcaagctgcctaagtactccctgttcgagctggaaaacggccggaagagaatgctggcctctgccggcgaactgcagaagggaaacgaactggccctgccctccaaatatgtgaacttcctgtacctggccagccactatgagaagctgaagggctcccccgaggataatgagcagaaacagctgtttgtggaacagcacaagcactacctggacgagatcatcgagcagatcagcgagttctccaagagagtgatcctggccgacgctaatctggacaaagtgctgtccgcctacaacaagcaccgggataagcccatcagagagcaggccgagaatatcatccacctgtttaccctgaccaatctgggagcccctgccgccttcaagtactttgacaccaccatcgaccggaagaggtacaccagcaccaaagaggtgctggacgccaccctgatccaccagagcatcaccggcctgtacgagacacggatcgacctgtctcagctgggaggtgacagcggcgggagcggcgggagcggggggagcactaatctgagcgacatcattgagaaggagactgggaaacagctggtcattcaggagtccatcctgatgctgcctgaggaggtggaggaagtgatcggcaacaagccagagtctgacatcctggtgcacaccgcctacgacgagtccacagatgagaatgtgatgctgctgacctctgacgcccccgagtataagccttgggccctggtcatccaggattctaacggcgagaataagatcaagatgctgagcggaggatccggaggatctggaggcagcaccaacctgtctgacatcatcgagaaggagacaggcaagcagctggtcatccaggagagcatcctgatgctgcccgaagaagtcgaagaagtgatcggaaacaagcctgagagcgatatcctggtccataccgcctacgacgagagtaccgacgaaaatgtgatgctgctgacatccgacgccccagagtataagccctgggctctggtcatccaggattccaacggagagaacaaaatcaaaatgctgtctggcggctcaaaaagaaccgccgacggcagcgaattcgagcccaagaagaagaggaaagtctaaccggtcatcatcaccatcaccattgagtttaaacccgctgatcagcctcgactgtgccttctagttgccagccatctgttgtttgcccctcccccgtgccttccttgaccctggaaggtgccactcccactgtcctttcctaataaaatgaggaaattgcatcgcattgtctgagtaggtgtcattctattctggggggtggggtggggcaggacagcaagggggaggattgggaagacaatagcaggcatgctggggatgcggtgggctctatggcttctgaggcggaaagaaccagctggggctcgataccgtcgacctctagctagagcttggcgtaatcatggtcatagctgtttcctgtgtgaaattgttatccgctcacaattccacacaacatacgagccggaagcataaagtgtaaagcctagggtgcctaatgagtgagctaactcacattaattgcgttgcgctcactgcccgctttccagtcgggaaacctgtcgtgccagctgcattaatgaatcggccaacgcgcggggagaggcggtttgcgtattgggcgctcttccgcttcctcgctcactgactcgctgcgctcggtcgttcggctgcggcgagcggtatcagctcactcaaaggcggtaatacggttatccacagaatcaggggataacgcaggaaagaacatgtgagcaaaaggccagcaaaaggccaggaaccgtaaaaaggccgcgttgctggcgtttttccataggctccgcccccctgacgagcatcacaaaaatcgacgctcaagtcagaggtggcgaaacccgacaggactataaagataccaggcgtttccccctggaagctccctcgtgcgctctcctgttccgaccctgccgcttaccggatacctgtccgcctttctcccttcgggaagcgtggcgctttctcatagctcacgctgtaggtatctcagttcggtgtaggtcgttcgctccaagctgggctgtgtgcacgaaccccccgttcagcccgaccgctgcgccttatccggtaactatcgtcttgagtccaacccggtaagacacgacttatcgccactggcagcagccactggtaacaggattagcagagcgaggtatgtaggcggtgctacagagttcttgaagtggtggcctaactacggctacactagaagaacagtatttggtatctgcgctctgctgaagccagttaccttcggaaaaagagttggtagctcttgatccggcaaacaaaccaccgctggtagcggtggtttttttgtttgcaagcagcagattacgcgcagaaaaaaaggatctcaagaagatcctttgatcttttctacggggtctgacactcagtggaacgaaaactcacgttaagggattttggtcatgagattatcaaaaaggatcttcacctagatccttttaaattaaaaatgaagttttaaatcaatctaaagtatatatgagtaaacttggtctgacagttaccaatgcttaatcagtgaggcacctatctcagcgatctgtctatttcgttcatccatagttgcctgactccccgtcgtgtagataactacgatacgggagggcttaccatctggccccagtgctgcaatgataccgcgagacccacgctcaccggctccagatttatcagcaataaaccagccagccggaagggccgagcgcagaagtggtcctgcaactttatccgcctccatccagtctattaattgttgccgggaagctagagtaagtagttcgccagttaatagtttgcgcaacgttgttgccattgctacaggcatcgtggtgtcacgctcgtcgtttggtatggcttcattcagctccggttcccaacgatcaaggcgagttacatgatcccccatgttgtgcaaaaaagcggttagctccttcggtcctccgatcgttgtcagaagtaagttggccgcagtgttatcactcatggttatggcagcactgcataattctcttactgtcatgccatccgtaagatgcttttctgtgactggtgagtactcaaccaagtcattctgagaatagtgtatgcggcgaccgagttgctcttgcccggcgtcaatacgggataataccgcgccacatagcagaactttaaaagtgctcatcattggaaaacgttcttcggggcgaaaactctcaaggatcttaccgctgttgagatccagttcgatgtaacccactcgtgcacccaactgatcttcagcatcttttactttcaccagcgtttctgggtgagcaaaaacaggaaggcaaaatgccgcaaaaaagggaataagggcgacacggaaatgttgaatactcatactcttcctttttcaatattattgaagcatttatcagggttattgtctcatgagcggatacatatttgaatgtatttagaaaaataaacaaataggggttccgcgcacatttccccgaaaagtgccacctgacgtcgacggatcgggagatcgatctcccgatcccctagggtcgactctcagtacaatctgctctgatgccgcatagttaagccagtatctgctccctgcttgtgtgttggaggtcgctgagtagtgcgcgagcaaaatttaagctacaacaaggcaaggcttgaccgacaattgcatgaagaatctgcttagggttaggcgttttgcgctgcttcgcgatgtacgggccagatatacgcgttgacattgattattgactagttattaatagtaatcaattacggggtcattagttcatagcccatatatggagttccgcgttacataacttacggtaaatggcccgcctggctgaccgcccaacgacccccgcccattgacgtcaataatgacgtatgttcccatagtaacgccaatagggactttccattgacgtcaatgggtggagtatttacggtaaactgcccacttggcagtacatcaagtgtatc

SEQ ID NO: 140 - DNA, 4368 bp, Homo sapiens
atgtccgactcgtgggtcccgaactccgcctcgggccaggacccagggggccgccggagggcctgggccgagctgctggcgggaagggtcaagagggaaaaatataatcctgaaagggcacagaaattaaaggaatcagctgtgcgcctcctgcgaagccatcaggacctgaatgcccttttgcttgaggtagaaggtccactgtgtaaaaaattgtctctcagcaaagtgattgactgtgacagttctgaggcctatgctaatcattctagttcatttataggctctgctttgcaggatcaagcctcaaggctgggggttcccgtgggtattctctcagccgggatggttgcctctagcgtgggacagatctgcacggctccagcggagaccagtcaccctgtgctgctgactgtggagcagagaaagaagctgtcttccctgttagagtttgctcagtatttattggcacacagtatgttctcccgtctttccttctgtcaagaattatggaaaatacagagttctttgttgcttgaagcggtgtggcatcttcacgtacaaggcattgtgagcctgcaagagctgctggaaagccatcccgacatgcatgctgtgggatcgtggctcttcaggaatctgtgctgcctttgtgaacagatggaagcatcctgccagcatgctgacgtcgccagggccatgctttctgattttgttcaaatgtttgttttgaggggatttcagaaaaactcagatctgagaagaactgtggagcctgaaaaaatgccgcaggtcacggttgatgtactgcagagaatgctgatttttgcacttgacgctttggctgctggagtacaggaggagtcctccactcacaagatcgtgaggtgctggttcggagtgttcagtggacacacgcttggcagtgtaatttccacagatcctctgaagaggttcttcagtcataccctgactcagatactcactcacagccctgtgctgaaagcatctgatgctgttcagatgcagagagagtggagctttgcgcggacacaccctctgctcacctcactgtaccgcaggctctttgtgatgctgagtgcagaggagttggttggccatttgcaagaagttctggaaacgcaggaggttcactggcagagagtgctctcctttgtgtctgccctggttgtctgctttccagaagcgcagcagctgcttgaagactgggtggcgcgtttgatggcccaggcattcgagagctgccagctggacagcatggtcactgcgttcctggttgtgcgccaggcagcactggagggcccctctgcgttcctgtcatatgcagactggttcaaggcctcctttgggagcacacgaggctaccatggctgcagcaagaaggccctggtcttcctgtttacgttcttgtcagaactcgtgccttttgagtctccccggtacctgcaggtgcacattctccacccacccctggttcccagcaagtaccgctccctcctcacagactacatctcattggccaagacacggctggccgacctcaaggtttctatagaaaacatgggactctacgaggatttgtcatcagctggggacattactgagccccacagccaagctcttcaggatgttgaaaaggccatcatggtgtttgagcatacggggaacatcccagtcaccgtcatggaggccagcatattcaggaggccttactacgtgtcccacttcctccccgccctgctcacacctcgagtgctccccaaagtccctgactcccgtgtggcgtttatagagtctctgaagagagcagataaaatccccccatctctgtactccacctactgccaggcctgctctgctgctgaagagaagccagaagatgcagccctgggagtgagggcagaacccaactctgctgaggagcccctgggacagctcacagctgcactgggagagctgagagcctccatgacagaccccagccagcgtgatgttatatcggcacaggtggcagtgatttctgaaagactgagggctgtcctgggccacaatgaggatgacagcagcgttgagatatcaaagattcagctcagcatcaacacgccgagactggagccacgggaacacattgctgtggacctcctgctgacgtctttctgtcagaacctgatggctgcctccagtgtcgctcccccggagaggcagggtccctgggctgccctcttcgtgaggaccatgtgtggacgtgtgctccctgcagtgctcacccggctctgccagctgctccgtcaccagggcccgagcctgagtgccccacatgtgctggggttggctgccctggccgtgcacctgggtgagtccaggtctgcgctcccagaggtggatgtgggtcctcctgcacctggtgctggccttcctgtccctgcgctctttgacagcctcctgacctgtaggacgagggattccttgttcttctgcctgaaattttgtacagcagcaatttcttactctctctgcaagttttcttcccagtcacgagatactttgtgcagctgcttatctccaggccttattaaaaagtttcagttcctcatgttcagattgttctcagaggcccgacagcctctttctgaggaggacgtagccagcctttcctggagacccttgcaccttccttctgcagactggcagagagctgccctctctctctggacacacagaaccttccgagaggtgttgaaagaggaagatgttcacttaacttaccaagactggttacacctggagctggaaattcaacctgaagctgatgctctttcagatactgaacggcaggacttccaccagtgggcgatccatgagcactttctccctgagtcctcggcttcagggggctgtgacggagacctgcaggctgcgtgtaccattcttgtcaacgcactgatggatttccaccaaagctcaaggagttatgaccactcagaaaattctgatttggtctttggtggccgcacaggaaatgaggatattatttccagattgcaggagatggtagctgacctggagctgcagcaagacctcatagtgcctctcggccacaccccttcccaggagcacttcctctttgagattttccgcagacggctccaggctctgacaagcgggtggagcgtggctgccagccttcagagacagagggagctgctaatgtacaaacggatcctcctccgcctgccttcgtctgtcctctgcggcagcagcttccaggcagaacagcccatcactgccagatgcgagcagttcttccacttggtcaactctgagatgagaaacttctgctcccacggaggtgccctgacacaggacatcactgcccacttcttcaggggcctcctgaacgcctgtctgcggagcagagacccctccctgatggtcgacttcatactggccaagtgccagacgaaatgccccttaattttgacctctgctctggtgtggtggccgagcctggagcctgtgctgctctgccggtggaggagacactgccagagcccgctgccccgggaactgcagaagctacaagaaggccggcagtttgccagcgatttcctctcccctgaggctgcctccccagcacccaacccggactggctctcagctgctgcactgcactttgcgattcaacaagtcagggaagaaaacatcaggaagcagctaaagaagctggactgcgagagagaggagctattggttttccttttcttcttctccttgatgggcctgctgtcgtcacatctgacctcaaatagcaccacagacctgccaaaggctttccacgtttgtgcagcaatcctcgagtgtttagagaagaggaagatatcctggctggcactctttcagttgacagagagtgacctcaggctggggcggctcctcctccgtgtggccccggatcagcacaccaggctgctgcctttcgctttttacagtcttctctcctacttccatgaagacgcggccatcagggaagaggccttcctgcatgttgctgtggacatgtacttgaagctggtccagctcttcgtggctggggatacaagcacagtttcacctccagctggcaggagcctggagctcaagggtcagggcaaccccgtggaactgataacaaaagctcgtctttttctgctgcagttaatacctcggtgcccgaaaaagagcttctcacacgtggcagagctgctggctgatcgtggggactgcgacccagaggtgagcgccgccctccagagcagacagcaggctgcccctgacgctgacctgtcccaggagcctcatctcttctga

SEQ ID NO: 141 - DNA, 1677 bp, Homo sapiens
atggctcaagattcagtagatctttcttgtgattatcagttttggatgcagaagctttctgtatgggatcaggcttccactttggaaacccagcaagacacctgtcttcacgtggctcagttccaggagttcctaaggaagatgtatgaagccttgaaagagatggattctaatacagtcattgaaagattccccacaattggtcaactgttggcaaaagcttgttggaatccttttattttagcatatgatgaaagccaaaaaattctaatatggtgcttatgttgtctaattaacaaagaaccacagaattctggacaatcaaaacttaactcctggatacagggtgtattatctcatatactttcagcactcagatttgataaagaagttgctcttttcactcaaggtcttgggtatgcacctatagattactatcctggtttgcttaaaaatatggttttatcattagcgtctgaactcagagagaatcatcttaatggatttaacactcaaaggcgaatggctcccgagcgagtggcgtccctgtcacgagtttgtgtcccacttattaccctgacagatgttgaccccctggtggaggctctcctcatctgtcatggacgtgaacctcaggaaatcctccagccagagttctttgaggctgtaaacgaggccattttgctgaagaagatttctctccccatgtcagctgtagtctgcctctggcttcggcaccttcccagccttgaaaaagcaatgctgcatctttttgaaaagctaatctccagtgagagaaattgtctgagaaggatcgaatgctttataaaagattcatcgctgcctcaagcagcctgccaccctgccatattccgggttgttgatgagatgttcaggtgtgcactcctggaaaccgatggggccctggaaatcatagccactattcaggtgtttacgcagtgctttgtagaagctctggagaaagcaagcaagcagctgcggtttgcactcaagacctactttccttacacttctccatctcttgccatggtgctgctgcaagaccctcaagatatccctcggggacactggctccagacactgaagcatatttctgaactgctcagagaagcagttgaagaccagactcatgggtcctgcggaggtccctttgagagctggttcctgttcattcacttcggaggatgggctgagatggtggcagagcaattactgatgtcggcagccgaaccccccacggccctgctgtggctcttggccttctactacggcccccgtgatgggaggcagcagagagcacagactatggtccaggtgaaggccgtgctgggccacctcctggcaatgtccagaagcagcagcctctcagcccaggacctgcagacggtagcaggacagggcacagacacagacctcagagctcctgcacaacagctgatcaggcaccttctcctcaacttcctgctctgggctcctggaggccacacgatcgcctgggatgtcatcaccctgatggctcacactgctgagataactcacgagatcattggctttcttgaccagaccttgtacagatggaatcgtcttggcattgaaagccctagatcagaaaaactggcccgagagctccttaaagagctgcgaactcaagtctag

SEQ ID NO: 142 - DNA, 1611 bp, Homo sapiens
atggcgacaccggacgcggggctccctggggctgagggcgtggagccggcgccctgggcgcagctggaggcccccgcccgcctcctgctgcaggcgctgcaggcggggcctgagggggcgcggcgcggcctgggggtgctccgggcgctgggcagccgcggctgggagcccttcgactggggtcgcttgctcgaggccctgtgccgggaggagccggtcgtgcaggggcctgacggccgtctggagctgaaaccactgttgctgcgattgccccggatatgccagaggaacctgatgtccctgctgatggccgttcggccatcgctgccggaaagtgggctcctctctgtgctgcagattgcccagcaggacctagcccctgacccagatgcctggctccgtgccctgggggaattgctgcgaagggatttgggggtggggacctccatggagggagcttctccactgtctgaaagatgccagagacagctccaaagtctatgtagggggctgggcctggggggcaggaggttgaaatccccccaggctccagaccctgaagaagaggagaacagggactcccagcagcctgggaaacgcagaaaggactcagaggaagaggctgccagtcctgaggggaagagggtccccaaaagattacggtgttgggaagaggaagaagatcatgagaaggagagacccgaacataagtcactggaatccctggcagatggaggaagtgcatctcctattaaggaccagcctgtcatggcagttaagactggcgaggacggttcgaatctggatgatgctaaaggtctggctgagagtttggagttgcccaaagctatccaggaccagcttcccaggctgcagcagctgctgaagaccttggaggaggggttagagggattggaggatgcccccccagttgagctacagcttcttcacgaatgtagtcccagccagatggacttgctgtgtgcccagctgcagctccctcagctctcagacctcggtctcctgcggctctgcacctggctgctggccctttcacctgatctcagcctcagcaatgctactgtgctgaccagaagcctctttcttggacggatcctctccttgacttcctcagcctcccgcctgcttacaactgccctgacctccttctgtgccaaatatacataccctgtctgcagcgccctccttgaccctgtgctccaggccccaggcacaggtcctgctcaaacagagttactgtgttgccttgtgaagatggagtccctggagccagatgcacaggttctaatgctgggacagatcttggagctgccctggaaggaggaaactttcttggtgttgcagtcactcctagagcggcaggtggagatgacccctgagaagttcagtgtcttaatggagaagctctgtaaaaaggggctggcagccaccacctccatggcctatgccaagctcatgctgacagtgatgaccaagtatcaggctaacatcactgagacccagaggctgggcctggctatggccctagaacctaacaccaccttcctgaggaagtccctgaaggccgccttgaaacatttgggcccctga

SEQ ID NO: 143 - DNA, 1125 bp, Homo sapiens
atggaatcccttctgcagcacctggatcgcttttccgagcttctggcggtctcaagcactacctacgtcagcacctgggaccccgccaccgtgcgccgggccttgcagtgggcgcgctacctgcgccacatccatcggcgctttggtcggcatggccccattcgcacggctctggagcggcggctgcacaaccagtggaggcaagagggcggctttgggcggggtccagttccgggattagcgaacttccaggccctcggtcactgtgacgtcctgctctctctgcgcctgctggagaaccgggccctcggggatgcagctcgttaccacctggtgcagcaactctttcccggcccgggcgtccgggacgccgatgaggagacactccaagagagcctggcccgccttgcccgccggcggtctgcggtgcacatgctgcgcttcaatggctatagagagaacccaaatctccaggaggactctctgatgaagacccaggcggagctgctgctggagcgtctgcaggaggtggggaaggccgaagcggagcgtcccgccaggtttctcagcagcctgtgggagcgcttgcctcagaacaacttcctgaaggtgatagcggtggcgctgttgcagccgcctttgtctcgtcggccccaagaagagttggaacccggcatccacaaatcacctggagaggggagccaagtgctagtccactggcttctggggaattcggaagtctttgctgccttttgtcgcgccctcccagccgggcttttgactttagtgactagccgccacccagcgctgtctcctgtctatctgggtctgctaacagactggggtcaacgtttgcactatgaccttcagaaaggcatttgggttggaactgagtcccaagatgtgccctgggaggagttgcacaataggtttcaaagcctctgtcaggcccctccacctctgaaagataaagttctaactgccctggagacctgtaaagcgcaggatggagattttgaagtacctggtcttagcatctggacagacctcttattagctcttcgtagtggtgcatttaggaaaagacaagttttgggtctcagcgcaggcctcagttctgtatag

SEQ ID NO: 144 - DNA, 1869 bp, Homo sapiens
atgtcccgccagaccacctctgtgggctccagctgcctggacctgtggagggaaaagaatgaccggctcgttcgacaggccaaggtggctcagaactccggtctgactctgaggcgacagcagttggctcaggatgcactggaagggctcagagggctcctccatagtctgcaagggctccctgcagctgttcctgttcttcccttggagctgactgtcacctgcaacttcattatcctgagggcaagcttggcccagggtttcacagaggatcaggcccaggatatccagcggagcctagagagagtgctggagacacaggagcagcaggggcccaggttggaacaggggctcagggagctgtgggactctgtccttcgtgcttcctgccttctgccggagctgctgtctgccctgcaccgcctggttggcctgcaggctgccctctggttgagtgctgaccgtcttggggacctggccttgttactagagaccctgaatggcagccagagtggagcctctaaggatctgctgttacttctgaaaacttggagtcccccagctgaggaattagatgctccattgaccctgcaggatgcccagggattgaaggatgtcctcctgacagcatttgcctaccgccaaggtctccaggagctgatcacagggaacccagacaaggcactaagcagccttcatgaagcggcctcaggcctgtgtccacggcctgtgttggtccaggtgtacacagcactggggtcctgtcaccgtaagatgggaaatccacagagagcactgttgtacttggttgcagccctgaaagagggatcagcctggggtcctccacttctggaggcctctaggctctatcagcaactgggggacacaacagcagagctggagagtctggagctgctagttgaggccttgaatgtcccatgcagttccaaagccccgcagtttctcattgaggtagaattactactgccaccacctgacctagcctcaccccttcattgtggcactcagagccagaccaagcacatactagcaagcaggtgcctacagacggggagggcaggagacgctgcagagcattacttggacctgctggccctgttgctggatagctcggagccaaggttctccccacccccctcccctccagggccctgtatgcctgaggtgtttttggaggcagcggtagcactgatccaggcaggcagagcccaagatgccttgactctatgtgaggagttgctcagccgcacatcatctctgctacccaagatgtcccggctgtgggaagatgccagaaaaggaaccaaggaactgccatactgcccactctgggtctctgccacccacctgcttcagggccaggcctgggttcaactgggtgcccaaaaagtggcaattagtgaatttagcaggtgcctcgagctgctcttccgggccacacctgaggaaaaagaacaaggggcagctttcaactgtgagcagggatgtaagtcagatgcggcactgcagcagcttcgggcagccgccctaattagtcgtggactggaatgggtagccagcggccaggataccaaagccttacaggacttcctcctcagtgtgcagatgtgcccaggtaatcgagacacttactttcacctgcttcagactctgaagaggctagatcggagggatgaggccactgcactctggtggaggctggaggcccaaactaaggggtcacatgaagatgctctgtggtctctccccctgtacctagaaagctatttgagctggatccgtccctctgatcgtgacgccttccttgaagaatttcggacatctctgccaaagtcttgtgacctgtag

SEQ ID NO: 145 - protein, 1455 aa, Homo sapiens
MSDSWVPNSASGQDPGGRRRAWAELLAGRVKREKYNPERAQKLKESAVRLLRSHQDLNALLLEVEGPLCKKLSLSKVIDCDSSEAYANHSSSFIGSALQDQASRLGVPVGILSAGMVASSVGQICTAPAETSHPVLLTVEQRKKLSSLLEFAQYLLAHSMFSRLSFCQELWKIQSSLLLEAVWHLHVQGIVSLQELLESHPDMHAVGSWLFRNLCCLCEQMEASCQHADVARAMLSDFVQMFVLRGFQKNSDLRRTVEPEKMPQVTVDVLQRMLIFALDALAAGVQEESSTHKIVRCWFGVFSGHTLGSVISTDPLKRFFSHTLTQILTHSPVLKASDAVQMQREWSFARTHPLLTSLYRRLFVMLSAEELVGHLQEVLETQEVHWQRVLSFVSALVVCFPEAQQLLEDWVARLMAQAFESCQLDSMVTAFLVVRQAALEGPSAFLSYADWFKASFGSTRGYHGCSKKALVFLFTFLSELVPFESPRYLQVHILHPPLVPSKYRSLLTDYISLAKTRLADLKVSIENMGLYEDLSSAGDITEPHSQALQDVEKAIMVFEHTGNIPVTVMEASIFRRPYYVSHFLPALLTPRVLPKVPDSRVAFIESLKRADKIPPSLYSTYCQACSAAEEKPEDAALGVRAEPNSAEEPLGQLTAALGELRASMTDPSQRDVISAQVAVISERLRAVLGHNEDDSSVEISKIQLSINTPRLEPREHIAVDLLLTSFCQNLMAASSVAPPERQGPWAALFVRTMCGRVLPAVLTRLCQLLRHQGPSLSAPHVLGLAALAVHLGESRSALPEVDVGPPAPGAGLPVPALFDSLLTCRTRDSLFFCLKFCTAAISYSLCKFSSQSRDTLCSCLSPGLIKKFQFLMFRLFSEARQPLSEEDVASLSWRPLHLPSADWQRAALSLWTHRTFREVLKEEDVHLTYQDWLHLELEIQPEADALSDTERQDFHQWAIHEHFLPESSASGGCDGDLQAACTILVNALMDFHQSSRSYDHSENSDLVFGGRTGNEDIISRLQEMVADLELQQDLIVPLGHTPSQEHFLFEIFRRRLQALTSGWSVAASLQRQRELLMYKRILLRLPSSVLCGSSFQAEQPITARCEQFFHLVNSEMRNFCSHGGALTQDITAHFFRGLLNACLRSRDPSLMVDFILAKCQTKCPLILTSALVWWPSLEPVLLCRWRRHCQSPLPRELQKLQEGRQFASDFLSPEAASPAPNPDWLSAAALHFAIQQVREENIRKQLKKLDCEREELLVFLFFFSLMGLLSSHLTSNSTTDLPKAFHVCAAILECLEKRKISWLALFQLTESDLRLGRLLLRVAPDQHTRLLPFAFYSLLSYFHEDAAIREEAFLHVAVDMYLKLVQLFVAGDTSTVSPPAGRSLELKGQGNPVELITKARLFLLQLIPRCPKKSFSHVAELLADRGDCDPEVSAALQSRQQAAPDADLSQEPHLF

SEQ ID NO: 146 - protein, 558 aa, Homo sapiens
MAQDSVDLSCDYQFWMQKLSVWDQASTLETQQDTCLHVAQFQEFLRKMYEALKEMDSNTVIERFPTIGQLLAKACWNPFILAYDESQKILIWCLCCLINKEPQNSGQSKLNSWIQGVLSHILSALRFDKEVALFTQGLGYAPIDYYPGLLKNMVLSLASELRENHLNGFNTQRRMAPERVASLSRVCVPLITLTDVDPLVEALLICHGREPQEILQPEFFEAVNEAILLKKISLPMSAVVCLWLRHLPSLEKAMLHLFEKLISSERNCLRRIECFIKDSSLPQAACHPAIFRVVDEMFRCALLETDGALEIIATIQVFTQCFVEALEKASKQLRFALKTYFPYTSPSLAMVLLQDPQDIPRGHWLQTLKHISELLREAVEDQTHGSCGGPFESWFLFIHFGGWAEMVAEQLLMSAAEPPTALLWLLAFYYGPRDGRQQRAQTMVQVKAVLGHLLAMSRSSSLSAQDLQTVAGQGTDTDLRAPAQQLIRHLLLNFLLWAPGGHTIAWDVITLMAHTAEITHEIIGFLDQTLYRWNRLGIESPRSEKLARELLKELRTQV

SEQ ID NO: 147 - protein, 536 aa, Homo sapiens
MATPDAGLPGAEGVEPAPWAQLEAPARLLLQALQAGPEGARRGLGVLRALGSRGWEPFDWGRLLEALCREEPVVQGPDGRLELKPLLLRLPRICQRNLMSLLMAVRPSLPESGLLSVLQIAQQDLAPDPDAWLRALGELLRRDLGVGTSMEGASPLSERCQRQLQSLCRGLGLGGRRLKSPQAPDPEEEENRDSQQPGKRRKDSEEEAASPEGKRVPKRLRCWEEEEDHEKERPEHKSLESLADGGSASPIKDQPVMAVKTGEDGSNLDDAKGLAESLELPKAIQDQLPRLQQLLKTLEEGLEGLEDAPPVELQLLHECSPSQMDLLCAQLQLPQLSDLGLLRLCTWLLALSPDLSLSNATVLTRSLFLGRILSLTSSASRLLTTALTSFCAKYTYPVCSALLDPVLQAPGTGPAQTELLCCLVKMESLEPDAQVLMLGQILELPWKEETFLVLQSLLERQVEMTPEKFSVLMEKLCKKGLAATTSMAYAKLMLTVMTKYQANITETQRLGLAMALEPNTTFLRKSLKAALKHLGP

SEQ ID NO: 148 - protein, 374 aa, Homo sapiens
MESLLQHLDRFSELLAVSSTTYVSTWDPATVRRALQWARYLRHIHRRFGRHGPIRTALERRLHNQWRQEGGFGRGPVPGLANFQALGHCDVLLSLRLLENRALGDAARYHLVQQLFPGPGVRDADEETLQESLARLARRRSAVHMLRFNGYRENPNLQEDSLMKTQAELLLERLQEVGKAEAERPARFLSSLWERLPQNNFLKVIAVALLQPPLSRRPQEELEPGIHKSPGEGSQVLVHWLLGNSEVFAAFCRALPAGLLTLVTSRHPALSPVYLGLLTDWGQRLHYDLQKGIWVGTESQDVPWEELHNRFQSLCQAPPPLKDKVLTALETCKAQDGDFEVPGLSIWTDLLLALRSGAFRKRQVLGLSAGLSSV

SEQ ID NO: 149 - protein, 622 aa, Homo sapiens
MSRQTTSVGSSCLDLWREKNDRLVRQAKVAQNSGLTLRRQQLAQDALEGLRGLLHSLQGLPAAVPVLPLELTVTCNFIILRASLAQGFTEDQAQDIQRSLERVLETQEQQGPRLEQGLRELWDSVLRASCLLPELLSALHRLVGLQAALWLSADRLGDLALLLETLNGSQSGASKDLLLLLKTWSPPAEELDAPLTLQDAQGLKDVLLTAFAYRQGLQELITGNPDKALSSLHEAASGLCPRPVLVQVYTALGSCHRKMGNPQRALLYLVAALKEGSAWGPPLLEASRLYQQLGDTTAELESLELLVEALNVPCSSKAPQFLIEVELLLPPPDLASPLHCGTQSQTKHILASRCLQTGRAGDAAEHYLDLLALLLDSSEPRFSPPPSPPGPCMPEVFLEAAVALIQAGRAQDALTLCEELLSRTSSLLPKMSRLWEDARKGTKELPYCPLWVSATHLLQGQAWVQLGAQKVAISEFSRCLELLFRATPEEKEQGAAFNCEQGCKSDAALQQLRAAALISRGLEWVASGQDTKALQDFLLSVQMCPGNRDTYFHLLQTLKRLDRRDEATALWWRLEAQTKGSHEDALWSLPLYLESYLSWIRPSDRDAFLEEFRTSLPKSCDL

SEQ ID NO: 150 - DNA, 1110 bp, Homo sapiens
atgctgaaaccaagcctgccctttacaagcctgctgttcctgcagctgccactgctgggggtcggactgaatactacaatcctgacaccaaacggaaatgaggacaccacagccgatttctttctgactaccatgcccactgacagtctgtcagtgagcaccctgccactgcccgaggtccagtgcttcgtgtttaacgtcgaatatatgaactgtacctggaatagctcctctgaacctcagccaacaaatctgactctgcactactggtataagaactctgacaatgataaggtgcagaaatgctcacattatctgttcagcgaggaaatcacctccggctgtcagctgcagaagaaagagattcacctgtaccagacatttgtggtccagctgcaggatccccgggaacctcggagacaggccactcagatgctgaagctgcagaacctggtcatcccatgggctcccgagaatctgaccctgcataaactgtccgagtctcagctggaactgaactggaacaataggttcctgaatcactgcctggagcatctggtgcagtaccgcacagactgggatcactcttggactgaacagagtgtggactatcgacataagtttagtctgccttcagtggatgggcagaaaaggtacacattcagggtccgctctcggttcaacccactgtgcggaagcgcccagcactggagcgagtggtcccaccccatccattgggggtctaacaccagcaaggagaatcctttcctgtttgccctggaagctgtggtcatttcagtgggaagcatgggcctgatcattagcctgctgtgcgtgtacttctggctggagcggaccatgcctagaatcccaacactgaagaacctggaggacctggtgacagaatatcacggcaatttttccgcttggtctggggtcagtaaaggactggcagagagcctgcagcccgattactccgagcggctgtgcctggtgtccgaaattccccctaaaggcggggcactgggagaaggccctggggcctccccctgcaaccagcactcaccctattgggcaccaccctgttacaccctgaaacccgaaacttaa

SEQ ID NO: 151 - DNA, 1110 bp, Homo sapiens
atgttgaagccatcattaccattcacatccctcttattcctgcagctgcccctgctgggagtggggctgaacacgacaattctgacgcccaatgggaatgaagacaccacagctgatttcttcctgaccactatgcccactgactccctcagcgtttccactctgcccctcccagaggttcagtgttttgtgttcaatgtcgagtacatgaattgcacttggaacagcagctctgagccccagcctaccaacctcactctgcattattggtacaagaactcggataatgataaagtccagaagtgcagccactatctattctctgaagaaatcacttctggctgtcagttgcaaaaaaaggagatccacctctaccaaacatttgttgttcagctccaggacccacgggaacccaggagacaggccacacagatgctaaaactgcagaatctggtgatcccctgggctccagagaacctaacacttcacaaactgagtgaatcccagctagaactgaactggaacaacagattcttgaaccactgtttggagcacttggtgcagtaccggactgactgggaccacagctggactgaacaatcagtggattatagacataagttctccttgcctagtgtggatgggcagaaacgctacacgtttcgtgttcggagccgctttaacccactctgtggaagtgctcagcattggagtgaatggagccacccaatccactgggggagcaatacttcaaaagagaatcctttcctgtttgcattggaagccgtggttatctctgttggctccatgggattgattatcagccttctctgtgtgtatttctggctggaacggacgatgccccgaattcccaccctgaagaacctagaggatcttgttactgaataccacgggaacttttcggcctggagtggtgtgtctaagggactggctgagagtctgcagccagactacagtgaacgactctgcctcgtcagtgagattcccccaaaaggaggggcccttggggaggggcctggggcctccccatgcaaccagcatagcccctactgggcccccccatgttacaccctaaagcctgaaacctga

SEQ ID NO: 152 - DNA, 1114 bp, Canis lupus
atgttgaagccaccattgccactcagatccctcttattcctgcagctgtctctgctgggggtggggctgaactccacggtccccatgcccaatgggaatgaagacatcacacctgatttcttcctgaccgctacaccctccgagaccctcagtgtttcctccctgcccctcccagaggtccagtgttttgtgttcaatgttgagtacatgaattgcacttggaacagcagctctgagccccggcccaccaacctgaccctgcactactggtataagaactccaatgatgataaagtccaggagtgtggccactacctattctctagagaggtcactgctggctgttggttgcagaaggaggagatccatctctacgaaacatttgttgtccagctccgggacccacgggaacccaggaggcagtccacacagaagctaaaactgcaaaatctggtgatcccctgggctccggagaacctaacccttcacaacctgagcgaatcccagctagaactgagctggagcaacagacacttggaccactgtttggagcatgttgtgcagtaccggagtgactgggaccgcagctggactgaacagtcagtggaccaccgaaatagcttctctctgcctagcgtggatgggcagaagttctacacgttccgtgtccgaagccgctataacccactctgtggaagcgctcagcgttggagtgaatggagccaccctatccactgggggagcaatacctccaaggagaatcctttgtttgcatcggaagctgtgcttatcccccttggctccatgggattgattattagccttatctgtgtgtactactggctggaacggtcgatcccccgaattcctaccctcaagaacctggaggatctggttactgaatatcacgggaatttttcggcctggagtggagtgtctaagggactggcggagagtctgcagccagactacagtgaatggctctgccacgtcagtgagattcccccaaaaggaggggctccaggggagggtcctgggggctccccctgcagccagcatagcccctactgggctcccccatgttataccctgaaacctgaaactggagccctga

SEQ ID NO: 153 - protein, 369 aa, Homo sapiens
MLKPSLPFTSLLFLQLPLLGVGLNTTILTPNGNEDTTADFFLTTMPTDSLSVSTLPLPEVQCFVFNVEYMNCTWNSSSEPQPTNLTLHYWYKNSDNDKVQKCSHYLFSEEITSGCQLQKKEIHLYQTFVVQLQDPREPRRQATQMLKLQNLVIPWAPENLTLHKLSESQLELNWNNRFLNHCLEHLVQYRTDWDHSWTEQSVDYRHKFSLPSVDGQKRYTFRVRSRFNPLCGSAQHWSEWSHPIHWGSNTSKENPFLFALEAVVISVGSMGLIISLLCVYFWLERTMPRIPTLKNLEDLVTEYHGNFSAWSGVSKGLAESLQPDYSERLCLVSEIPPKGGALGEGPGASPCNQHSPYWAPPCYTLKPET

SEQ ID NO: 154 - protein, 373 aa, Canis lupus
MLKPPLPLRSLLFLQLSLLGVGLNSTVPMPNGNEDITPDFFLTATPSETLSVSSLPLPEVQCFVFNVEYMNCTWNSSSEPRPTNLTLHYWYKNSNDDKVQECGHYLFSREVTAGCWLQKEEIHLYETFVVQLRDPREPRRQSTQKLKLQNLVIPWAPENLTLHNLSESQLELSWSNRHLDHCLEHVVQYRSDWDRSWTEQSVDHRNSFSLPSVDGQKFYTFRVRSRYNPLCGSAQRWSEWSHPIHWGSNTSKENPLFASEAVLIPLGSMGLIISLICVYYWLERSIPRIPTLKNLEDLVTEYHGNFSAWSGVSKGLAESLQPDYSEWLCHVSEIPPKGGAPGEGPGGSPCSQHSPYWAPPCYTLKPETGALIP

SEQ ID NO: 155 - DNA, 3375 bp, Homo sapiens
atggcacctccaagtgaagagacgcccctgatccctcagcgttcatgcagcctcttgtccacggaggctggtgccctgcatgtgctgctgcccgctcggggccccgggcccccccagcgcctatctttctcctttggggaccacttggctgaggacctgtgcgtgcaggctgccaaggccagcggcatcctgcctgtgtaccactccctctttgctctggccacggaggacctgtcctgctggttccccccgagccacatcttctccgtggaggatgccagcacccaagtcctgctgtacaggattcgcttttacttccccaattggtttgggctggagaagtgccaccgcttcgggctacgcaaggatttggccagtgctatccttgacctgccagtcctggagcacctctttgcccagcaccgcagtgacctggtgagtgggcgcctccccgtgggcctcagtctcaaggagcagggtgagtgtctcagcctggccgtgttggacctggcccggatggcgcgagagcaggcccagcggccgggagagctgctgaagactgtcagctacaaggcctgcctacccccaagcctgcgcgacctgatccagggcctgagcttcgtgacgcggaggcgtattcggaggacggtgcgcagagccctgcgccgcgtggccgcctgccaggcagaccggcactcgctcatggccaagtacatcatggacctggagcggctggatccagccggggccgccgagaccttccacgtgggcctccctggggcccttggtggccacgacgggctggggctgctccgcgtggctggtgacggcggcatcgcctggacccagggagaacaggaggtcctccagcccttctgcgactttccagaaatcgtagacattagcatcaagcaggccccgcgcgttggcccggccggagagcaccgcctggtcactgttaccaggacagacaaccagattttagaggccgagttcccagggctgcccgaggctctgtcgttcgtggcgctcgtggacggctacttccggctgaccacggactcccagcacttcttctgcaaggaggtggcaccgccgaggctgctggaggaagtggccgagcagtgccacggccccatcactctggactttgccatcaacaagctcaagactgggggctcacgtcctggctcctatgttctccgccgcagcccccaggactttgacagcttcctcctcactgtctgtgtccagaacccccttggtcctgattataagggctgcctcatccggcgcagccccacaggaaccttccttctggttggcctcagccgaccccacagcagtcttcgagagctcctggcaacctgctgggatggggggctgcacgtagatggggtggcagtgaccctcacttcctgctgtatccccagacccaaagaaaagtccaacctgatcgtggtccagagaggtcacagcccacccacatcatccttggttcagccccaatcccaataccagctgagtcagatgacatttcacaagatccctgctgacagcctggagtggcatgagaacctgggccatgggtccttcaccaagatttaccggggctgtcgccatgaggtggtggatggggaggcccgaaagacagaggtgctgctgaaggtcatggatgccaagcacaagaactgcatggagtcattcctggaagcagcgagcttgatgagccaagtgtcgtaccggcatctcgtgctgctccacggcgtgtgcatggctggagacagcaccatggtgcaggaatttgtacacctgggggccatagacatgtatctgcgaaaacgtggccacctggtgccagccagctggaagctgcaggtggtcaaacagctggcctacgccctcaactatctggaggacaaaggcctgccccatggcaatgtctctgcccggaaggtgctcctggctcgggagggggctgatgggagcccgcccttcatcaagctgagtgaccctggggtcagccccgctgtgttaagcctggagatgctcaccgacaggatcccctgggtggcccccgagtgtctccgggaggcgcagacacttagcttggaagctgacaagtggggcttcggcgccacggtctgggaagtgtttagtggcgtcaccatgcccatcagtgccctggatcctgctaagaaactccaattttatgaggaccggcagcagctgccggcccccaagtggacagagctggccctgctgattcaacagtgcatggcctatgagccggtccagaggccctccttccgagccgtcattcgtgacctcaatagcctcatctcttcagactatgagctcctctcagaccccacacctggtgccctggcacctcgtgatgggctgtggaatggtgcccagctctatgcctgccaagaccccacgatcttcgaggagagacacctcaagtacatctcacagctgggcaagggcaactttggcagcgtggagctgtgccgctatgacccgctaggcgacaatacaggtgccctggtggccgtgaaacagctgcagcacagcgggccagaccagcagagggactttcagcgggagattcagatcctcaaagcactgcacagtgatttcattgtcaagtatcgtggtgtcagctatggcccgggccgccagagcctgcggctggtcatggagtacctgcccagcggctgcttgcgcgacttcctgcagcggcaccgcgcgcgcctcgatgccagccgcctccttctctattcctcgcagatctgcaagggcatggagtacctgggctcccgccgctgcgtgcaccgcgacctggccgcccgaaacatcctcgtggagagcgaggcacacgtcaagatcgctgacttcggcctagctaagctgctgccgcttgacaaagactactacgtggtccgcgagccaggccagagccccattttctggtatgcccccgaatccctctcggacaacatcttctctcgccagtcagacgtctggagcttcggggtcgtcctgtacgagctcttcacctactgcgacaaaagctgcagcccctcggccgagttcctgcggatgatgggatgtgagcgggatgtccccgccctctgccgcctcttggaactgctggaggagggccagaggctgccggcgcctcctgcctgccctgctgaggttcacgagctcatgaagctgtgctgggcccctagcccacaggaccggccatcattcagcgccctgggcccccagctggacatgctgtggagcggaagccgggggtgtgagactcatgccttcactgctcacccagagggcaaacaccactccctgtccttttcatag

SEQ ID NO: 156 - DNA, 870 bp, Homo sapiens
atggagaacggatacacctatgaagattataagaacactgcagaatggcttctgtctcacactaagcaccgacctcaagttgcaataatctgtggttctggattaggaggtctgactgataaattaactcaggcccagatctttgactacggtgaaatccccaactttccccgaagtacagtgccaggtcatgctggccgactggtgtttgggttcctgaatggcagggcctgtgtgatgatgcagggcaggttccacatgtatgaagggtacccactctggaaggtgacattcccagtgagggttttccaccttctgggtgtggacaccctggtagtcaccaatgcagcaggagggctgaaccccaagtttgaggttggagatatcatgctgatccgtgaccatatcaacctacctggtttcagtggtcagaaccctctcagagggcccaatgatgaaaggtttggagatcgtttccctgccatgtctgatgcctacgaccggactatgaggcagagggctctcagtacctggaaacaaatgggggagcaacgtgagctacaggaaggcacctatgtgatggtggcaggccccagctttgagactgtggcagaatgtcgtgtgctgcagaagctgggagcagacgctgttggcatgagtacagtaccagaagttatcgttgcacggcactgtggacttcgagtctttggcttctcactcatcactaacaaggtcatcatggattatgaaagcctggagaaggccaaccatgaagaagtcttagcagctggcaaacaagctgcacagaaattggaacagtttgtctccattcttatggccagcattccactccctgacaaagccagttga

SEQ ID NO: 157 - DNA, 1092 bp, Homo sapiens
atggcccagacgcccgccttcgacaagcccaaagtagaactgcatgtccacctagacggatccatcaagcctgaaaccatcttatactatggcaggaggagagggatcgccctcccagctaacacagcagaggggctgctgaacgtcattggcatggacaagccgctcacccttccagacttcctggccaagtttgactactacatgcctgctatcgcgggctgccgggaggctatcaaaaggatcgcctatgagtttgtagagatgaaggccaaagagggcgtggtgtatgtggaggtgcggtacagtccgcacctgctggccaactccaaagtggagccaatcccctggaaccaggctgaaggggacctcaccccagacgaggtggtggccctagtgggccagggcctgcaggagggggagcgagacttcggggtcaaggcccggtccatcctgtgctgcatgcgccaccagcccaactggtcccccaaggtggtggagctgtgtaagaagtaccagcagcagaccgtggtagccattgacctggctggagatgagaccatcccaggaagcagcctcttgcctggacatgtccaggcctaccaggaggctgtgaagagcggcattcaccgtactgtccacgccggggaggtgggctcggccgaagtagtaaaagaggctgtggacatactcaagacagagcggctgggacacggctaccacaccctggaagaccaggccctttataacaggctgcggcaggaaaacatgcacttcgagatctgcccctggtccagctacctcactggtgcctggaagccggacacggagcatgcagtcattcggctcaaaaatgaccaggctaactactcgctcaacacagatgacccgctcatcttcaagtccaccctggacactgattaccagatgaccaaacgggacatgggctttactgaagaggagtttaaaaggctgaacatcaatgcggccaaatctagtttcctcccagaagatgaaaagagggagcttctcgacctgctctataaagcctatgggatgccaccttcagcctctgcagggcagaacctctga

SEQ ID NO: 158 - DNA, 3132 bp, Homo sapiens
atggcagcctctttcccacccaccttgggactcagttctgccccagatgaaattcagcacccacatattaaattttcagaatggaaatttaagctgttccgggtgagatcctttgaaaagacacctgaagaagctcaaaaggaaaagaaggattcctttgaggggaaaccctctctggagcaatctccagcagtcctggacaaggctgatggtcagaagccagtcccaactcagccattgttaaaagcccaccctaagttttcaaagaaatttcacgacaacgagaaagcaagaggcaaagcgatccatcaagccaaccttcgacatctctgccgcatctgtgggaattcttttagagctgatgagcacaacaggagatatccagtccatggtcctgtggatggtaaaaccctaggccttttacgaaagaaggaaaagagagctacttcctggccggacctcattgccaaggttttccggatcgatgtgaaggcagatgttgactcgatccaccccactgagttctgccataactgctggagcatcatgcacaggaagtttagcagtgccccatgtgaggtttacttcccgaggaacgtgaccatggagtggcacccccacacaccatcctgtgacatctgcaacactgcccgtcggggactcaagaggaagagtcttcagccaaacttgcagctcagcaaaaaactcaaaactgtgcttgaccaagcaagacaagcccgtcagcgcaagagaagagctcaggcaaggatcagcagcaaggatgtcatgaagaagatcgccaactgcagtaagatacatcttagtaccaagctccttgcagtggacttcccagagcactttgtgaaatccatctcctgccagatctgtgaacacattctggctgaccctgtggagaccaactgtaagcatgtcttttgccgggtctgcattctcagatgcctcaaagtcatgggcagctattgtccctcttgccgatatccatgcttccctactgacctggagagtccagtgaagtcctttctgagcgtcttgaattccctgatggtgaaatgtccagcaaaagagtgcaatgaggaggtcagtttggaaaaatataatcaccacatctcaagtcacaaggaatcaaaagagatttttgtgcacattaataaagggggccggccccgccaacatcttctgtcgctgactcggagagctcagaagcaccggctgagggagctcaagctgcaagtcaaagcctttgctgacaaagaagaaggtggagatgtgaagtccgtgtgcatgaccttgttcctgctggctctgagggcgaggaatgagcacaggcaagctgatgagctggaggccatcatgcagggaaagggctctggcctgcagccagctgtttgcttggccatccgtgtcaacaccttcctcagctgcagtcagtaccacaagatgtacaggactgtgaaagccatcacagggagacagatttttcagcctttgcatgcccttcggaatgctgagaaggtacttctgccaggctaccaccactttgagtggcagccacctctgaagaatgtgtcttccagcactgatgttggcattattgatgggctgtctggactatcatcctctgtggatgattacccagtggacaccattgcaaagaggttccgctatgattcagctttggtgtctgctttgatggacatggaagaagacatcttggaaggcatgagatcccaagaccttgatgattacctgaatggccccttcactgtggtggtgaaggagtcttgtgatggaatgggagacgtgagtgagaagcatgggagtgggcctgtagttccagaaaaggcagtccgtttttcattcacaatcatgaaaattactattgcccacagctctcagaatgtgaaagtatttgaagaagccaaacctaactctgaactgtgttgcaagccattgtgccttatgctggcagatgagtctgaccacgagacgctgactgccatcctgagtcctctcattgctgagagggaggccatgaagagcagtgaattaatgcttgagctgggaggcattctccggactttcaagttcatcttcaggggcaccggctatgatgaaaaacttgtgcgggaagtggaaggcctcgaggcttctggctcagtctacatttgtactctttgtgatgccacccgtctggaagcctctcaaaatcttgtcttccactctataaccagaagccatgctgagaacctggaacgttatgaggtctggcgttccaacccttaccatgagtctgtggaagaactgcgggatcgggtgaaaggggtctcagctaaacctttcattgagacagtcccttccatagatgcactccactgtgacattggcaatgcagctgagttctacaagatcttccagctagagataggggaagtgtataagaatcccaatgcttccaaagaggaaaggaaaaggtggcaggccacactggacaagcatctccggaagaagatgaacctcaaaccaatcatgaggatgaatggcaactttgccaggaagctcatgaccaaagagactgtggatgcagtttgtgagttaattccttccgaggagaggcacgaggctctgagggagctgatggatctttacctgaagatgaaaccagtatggcgatcatcatgccctgctaaagagtgcccagaatccctctgccagtacagtttcaattcacagcgttttgctgagctcctttctacgaagttcaagtataggtatgagggaaaaatcaccaattattttcacaaaaccctggcccatgttcctgaaattattgagagggatggctccattggggcatgggcaagtgagggaaatgagtctggtaacaaactgtttaggcgcttccggaaaatgaatgccaggcagtccaaatgctatgagatggaagatgtcctgaaacaccactggttgtacacctccaaatacctccagaagtttatgaatgctcataatgcattaaaaacctctgggtttaccatgaaccctcaggcaagcttaggggacccattaggcatagaggactctctggaaagccaagattcaatggaattttaa

SEQ ID NO: 159 - DNA, 1584 bp, Homo sapiens
atgtctctgcagatggtaacagtcagtaataacatagccttaattcagccaggcttctcactgatgaattttgatggacaagttttcttctttggacaaaaaggctggcccaaaagatcctgccccactggagttttccatctggatgtaaagcataaccatgtcaaactgaagcctacaattttctctaaggattcctgctacctccctcctcttcgctacccagccacttgcacattcaaaggcagcttggagtctgaaaagcatcaatacatcatccatggagggaaaacaccaaacaatgaggtttcagataagatttatgtcatgtctattgtttgcaagaacaacaaaaaggttacttttcgctgcacagagaaagacttggtaggagatgttcctgaagccagatatggtcattccattaatgtggtgtacagccgagggaaaagtatgggtgttctctttggaggacgctcatacatgccttctacccacagaaccacagaaaaatggaatagtgtagctgactgcctgccctgtgttttcctggtggattttgaatttgggtgtgctacatcatacattcttccagaacttcaggatgggctatcttttcatgtctctattgccaaaaatgacaccatctatattttaggaggacattcacttgccaataatatccggcctgccaacctgtacagaataagggttgatcttcccctgggtagcccagctgtgaattgcacagtcttgccaggaggaatctctgtctccagtgcaatcctgactcaaactaacaatgatgaatttgttattgttggtggctatcagcttgaaaatcaaaaaagaatgatctgcaacatcatctctttagaggacaacaagatagaaattcgtgagatggagaccccagattggaccccagacattaagcacagcaagatatggtttggaagcaacatgggaaatggaactgtttttcttggcataccaggagacaataaacaagttgtttcagaaggattctatttctatatgttgaaatgtgctgaagatgatactaatgaagagcagacaacattcacaaacagtcaaacatcaacagaagatccaggggattccactccctttgaagactctgaagaattttgtttcagtgcagaagcaaatagttttgatggtgatgatgaatttgacacctataatgaagatgatgaagaagatgagtctgagacaggctactggattacatgctgccctacttgtgatgtggatatcaacacttgggtaccattctattcaactgagctcaacaaacccgccatgatctactgctctcatggggatgggcactgggtccatgctcagtgcatggatctggcagaacgcacactcatccatctgtcagcaggaagcaacaagtattactgcaatgagcatgtggagatagcaagagctctacacactccccaaagagtcctacccttaaaaaagcctccaatgaaatccctccgtaaaaaaggttctggaaaaatcttgactcctgccaagaaatcctttcttagaaggttgtttgattag

SEQ ID NO: 160 - protein, 1124 aa, Homo sapiens
MAPPSEETPLIPQRSCSLLSTEAGALHVLLPARGPGPPQRLSFSFGDHLAEDLCVQAAKASGILPVYHSLFALATEDLSCWFPPSHIFSVEDASTQVLLYRIRFYFPNWFGLEKCHRFGLRKDLASAILDLPVLEHLFAQHRSDLVSGRLPVGLSLKEQGECLSLAVLDLARMAREQAQRPGELLKTVSYKACLPPSLRDLIQGLSFVTRRRIRRTVRRALRRVAACQADRHSLMAKYIMDLERLDPAGAAETFHVGLPGALGGHDGLGLLRVAGDGGIAWTQGEQEVLQPFCDFPEIVDISIKQAPRVGPAGEHRLVTVTRTDNQILEAEFPGLPEALSFVALVDGYFRLTTDSQHFFCKEVAPPRLLEEVAEQCHGPITLDFAINKLKTGGSRPGSYVLRRSPQDFDSFLLTVCVQNPLGPDYKGCLIRRSPTGTFLLVGLSRPHSSLRELLATCWDGGLHVDGVAVTLTSCCIPRPKEKSNLIVVQRGHSPPTSSLVQPQSQYQLSQMTFHKIPADSLEWHENLGHGSFTKIYRGCRHEVVDGEARKTEVLLKVMDAKHKNCMESFLEAASLMSQVSYRHLVLLHGVCMAGDSTMVQEFVHLGAIDMYLRKRGHLVPASWKLQVVKQLAYALNYLEDKGLPHGNVSARKVLLAREGADGSPPFIKLSDPGVSPAVLSLEMLTDRIPWVAPECLREAQTLSLEADKWGFGATVWEVFSGVTMPISALDPAKKLQFYEDRQQLPAPKWTELALLIQQCMAYEPVQRPSFRAVIRDLNSLISSDYELLSDPTPGALAPRDGLWNGAQLYACQDPTIFEERHLKYISQLGKGNFGSVELCRYDPLGDNTGALVAVKQLQHSGPDQQRDFQREIQILKALHSDFIVKYRGVSYGPGRQSLRLVMEYLPSGCLRDFLQRHRARLDASRLLLYSSQICKGMEYLGSRRCVHRDLAARNILVESEAHVKIADFGLAKLLPLDKDYYVVREPGQSPIFWYAPESLSDNIFSRQSDVWSFGVVLYELFTYCDKSCSPSAEFLRMMGCERDVPALCRLLELLEEGQRLPAPPACPAEVHELMKLCWAPSPQDRPSFSALGPQLDMLWSGSRGCETHAFTAHPEGKHHSLSFS

SEQ ID NO: 161 - protein, 289 aa, Homo sapiens
MENGYTYEDYKNTAEWLLSHTKHRPQVAIICGSGLGGLTDKLTQAQIFDYGEIPNFPRSTVPGHAGRLVFGFLNGRACVMMQGRFHMYEGYPLWKVTFPVRVFHLLGVDTLVVTNAAGGLNPKFEVGDIMLIRDHINLPGFSGQNPLRGPNDERFGDRFPAMSDAYDRTMRQRALSTWKQMGEQRELQEGTYVMVAGPSFETVAECRVLQKLGADAVGMSTVPEVIVARHCGLRVFGFSLITNKVIMDYESLEKANHEEVLAAGKQAAQKLEQFVSILMASIPLPDKAS

SEQ ID NO: 162 - protein, 363 aa, Homo sapiens
MAQTPAFDKPKVELHVHLDGSIKPETILYYGRRRGIALPANTAEGLLNVIGMDKPLTLPDFLAKFDYYMPAIAGCREAIKRIAYEFVEMKAKEGVVYVEVRYSPHLLANSKVEPIPWNQAEGDLTPDEVVALVGQGLQEGERDFGVKARSILCCMRHQPNWSPKVVELCKKYQQQTVVAIDLAGDETIPGSSLLPGHVQAYQEAVKSGIHRTVHAGEVGSAEVVKEAVDILKTERLGHGYHTLEDQALYNRLRQENMHFEICPWSSYLTGAWKPDTEHAVIRLKNDQANYSLNTDDPLIFKSTLDTDYQMTKRDMGFTEEEFKRLNINAAKSSFLPEDEKRELLDLLYKAYGMPPSASAGQNL

SEQ ID NO: 163 - protein, 1043 aa, Homo sapiens
MAASFPPTLGLSSAPDEIQHPHIKFSEWKFKLFRVRSFEKTPEEAQKEKKDSFEGKPSLEQSPAVLDKADGQKPVPTQPLLKAHPKFSKKFHDNEKARGKAIHQANLRHLCRICGNSFRADEHNRRYPVHGPVDGKTLGLLRKKEKRATSWPDLIAKVFRIDVKADVDSIHPTEFCHNCWSIMHRKFSSAPCEVYFPRNVTMEWHPHTPSCDICNTARRGLKRKSLQPNLQLSKKLKTVLDQARQARQHKRRAQARISSKDVMKKIANCSKIHLSTKLLAVDFPEHFVKSISCQICEHILADPVETNCKHVFCRVCILRCLKVMGSYCPSCRYPCFPTDLESPVKSFLSVLNSLMVKCPAKECNEEVSLEKYNHHISSHKESKEIFVHINKGGRPRQHLLSLTRRAQKHRLRELKLQVKAFADKEEGGDVKSVCMTLFLLALRARNEHRQADELEAIMQGKGSGLQPAVCLAIRVNTFLSCSQYHKMYRTVKAITGRQIFQPLHALRNAEKVLLPGYHHFEWQPPLKNVSSSTDVGIIDGLSGLSSSVDDYPVDTIAKRFRYDSALVSALMDMEEDILEGMRSQDLDDYLNGPFTVVVKESCDGMGDVSEKHGSGPVVPEKAVRFSFTIMKITIAHSSQNVKVFEEAKPNSELCCKPLCLMLADESDHETLTAILSPLIAEREAMKSSELMLELGGILRTFKFIFRGTGYDEKLVREVEGLEASGSVYICTLCDATRLEASQNLVFHSITRSHAENLERYEVWRSNPYHESVEELRDRVKGVSAKPFIETVPSIDALHCDIGNAAEFYKIFQLEIGEVYKNPNASKEERKRWQATLDKHLRKKMNLKPIMRMNGNFARKLMTKETVDAVCELIPSEERHEALRELMDLYLKMKPVWRSSCPAKECPESLCQYSFNSQRFAELLSTKFKYRYEGKITNYFHKTLAHVPEIIERDGSIGAWASEGNESGNKLFRRFRKMNARQSKCYEMEDVLKHHWLYTSKYLQKFMNAHNALKTSGFTMNPQASLGDPLGIEDSLESQDSMEF

SEQ ID NO: 164 - protein, 527 aa, Homo sapiens
MSLQMVTVSNNIALIQPGFSLMNFDGQVFFFGQKGWPKRSCPTGVFHLDVKHNHVKLKPTIFSKDSCYLPPLRYPATCTFKGSLESEKHQYIIHGGKTPNNEVSDKIYVMSIVCKNNKKVTFRCTEKDLVGDVPEARYGHSINVVYSRGKSMGVLFGGRSYMPSTHRTTEKWNSVADCLPCVFLVDFEFGCATSYILPELQDGLSFHVSIAKNDTIYILGGHSLANNIRPANLYRIRVDLPLGSPAVNCTVLPGGISVSSAILTQTNNDEFVIVGGYQLENQKRMICNIISLEDNKIEIREMETPDWTPDIKHSKIWFGSNMGNGTVFLGIPGDNKQVVSEGFYFYMLKCAEDDTNEEQTTFTNSQTSTEDPGDSTPFEDSEEFCFSAEANSFDGDDEFDTYNEDDEEDESETGYWITCCPTCDVDINTWVPFYSTELNKPAMIYCSHGDGHWVHAQCMDLAERTLIHLSAGSNKYYCNEHVEIARALHTPQRVLPLKKPPMKSLRKKGSGKILTPAKKSFLRRLFD

SEQ ID NO: 165 - DNA, 4904 bp, Artificial sequence
  PGK promoter associated with FANCA gene
ggggttggggttgcgccttttccaaggcagccctgggtttgcgcagggacgcggctgctctgggcgtggttccgggaaacgcagcggcgccgaccctgggtctcgcacattcttcacgtccgttcgcagcgtcacccggatcttcgccgctacccttgtgggccccccggcgacgcttcctgctccgcccctaagtcgggaaggttccttgcggttcgcggcgtgccggacgtgacaaacggaagccgcacgtctcactagtaccctcgcagacggacagcgccagggagcaatggcagcgcgccgaccgcgatgggctgtggccaatagcggctgctcagcggggcgcgccgagagcagcggccgggaaggggcggtgcgggaggcggggtgtggggcggtagtgtgggccctgttcctgcccgcgcggtgttccgcattctgcaagcctccggagcgcacgtcggcagtcggctccctcgttgaccgaatcaccgacctctctccccagggggatccaccggtccgccaaggccatgtccgactcgtgggtcccgaactccgcctcgggccaggacccagggggccgccggagggcctgggccgagctgctggcgggaagggtcaagagggaaaaatataatcctgaaagggcacagaaattaaaggaatcagctgtgcgcctcctgcgaagccatcaggacctgaatgcccttttgcttgaggtagaaggtccactgtgtaaaaaattgtctctcagcaaagtgattgactgtgacagttctgaggcctatgctaatcattctagttcatttataggctctgctttgcaggatcaagcctcaaggctgggggttcccgtgggtattctctcagccgggatggttgcctctagcgtgggacagatctgcacggctccagcggagaccagtcaccctgtgctgctgactgtggagcagagaaagaagctgtcttccctgttagagtttgctcagtatttattggcacacagtatgttctcccgtctttccttctgtcaagaattatggaaaatacagagttctttgttgcttgaagcggtgtggcatcttcacgtacaaggcattgtgagcctgcaagagctgctggaaagccatcccgacatgcatgctgtgggatcgtggctcttcaggaatctgtgctgcctttgtgaacagatggaagcatcctgccagcatgctgacgtcgccagggccatgctttctgattttgttcaaatgtttgttttgaggggatttcagaaaaactcagatctgagaagaactgtggagcctgaaaaaatgccgcaggtcacggttgatgtactgcagagaatgctgatttttgcacttgacgctttggctgctggagtacaggaggagtcctccactcacaagatcgtgaggtgctggttcggagtgttcagtggacacacgcttggcagtgtaatttccacagatcctctgaagaggttcttcagtcataccctgactcagatactcactcacagccctgtgctgaaagcatctgatgctgttcagatgcagagagagtggagctttgcgcggacacaccctctgctcacctcactgtaccgcaggctctttgtgatgctgagtgcagaggagttggttggccatttgcaagaagttctggaaacgcaggaggttcactggcagagagtgctctcctttgtgtctgccctggttgtctgctttccagaagcgcagcagctgcttgaagactgggtggcgcgtttgatggcccaggcattcgagagctgccagctggacagcatggtcactgcgttcctggttgtgcgccaggcagcactggagggcccctctgcgttcctgtcatatgcagactggttcaaggcctcctttgggagcacacgaggctaccatggctgcagcaagaaggccctggtcttcctgtttacgttcttgtcagaactcgtgccttttgagtctccccggtacctgcaggtgcacattctccacccacccctggttcccagcaagtaccgctccctcctcacagactacatctcattggccaagacacggctggccgacctcaaggtttctatagaaaacatgggactctacgaggatttgtcatcagctggggacattactgagccccacagccaagctcttcaggatgttgaaaaggccatcatggtgtttgagcatacggggaacatcccagtcaccgtcatggaggccagcatattcaggaggccttactacgtgtcccacttcctccccgccctgctcacacctcgagtgctccccaaagtccctgactcccgtgtggcgtttatagagtctctgaagagagcagataaaatccccccatctctgtactccacctactgccaggcctgctctgctgctgaagagaagccagaagatgcagccctgggagtgagggcagaacccaactctgctgaggagcccctgggacagctcacagctgcactgggagagctgagagcctccatgacagaccccagccagcgtgatgttatatcggcacaggtggcagtgatttctgaaagactgagggctgtcctgggccacaatgaggatgacagcagcgttgagatatcaaagattcagctcagcatcaacacgccgagactggagccacgggaacacattgctgtggacctcctgctgacgtctttctgtcagaacctgatggctgcctccagtgtcgctcccccggagaggcagggtccctgggctgccctcttcgtgaggaccatgtgtggacgtgtgctccctgcagtgctcacccggctctgccagctgctccgtcaccagggcccgagcctgagtgccccacatgtgctggggttggctgccctggccgtgcacctgggtgagtccaggtctgcgctcccagaggtggatgtgggtcctcctgcacctggtgctggccttcctgtccctgcgctctttgacagcctcctgacctgtaggacgagggattccttgttcttctgcctgaaattttgtacagcagcaatttcttactctctctgcaagttttcttcccagtcacgagatactttgtgcagctgcttatctccaggccttattaaaaagtttcagttcctcatgttcagattgttctcagaggcccgacagcctctttctgaggaggacgtagccagcctttcctggagacccttgcaccttccttctgcagactggcagagagctgccctctctctctggacacacagaaccttccgagaggtgttgaaagaggaagatgttcacttaacttaccaagactggttacacctggagctggaaattcaacctgaagctgatgctctttcagatactgaacggcaggacttccaccagtgggcgatccatgagcactttctccctgagtcctcggcttcagggggctgtgacggagacctgcaggctgcgtgtaccattcttgtcaacgcactgatggatttccaccaaagctcaaggagttatgaccactcagaaaattctgatttggtctttggtggccgcacaggaaatgaggatattatttccagattgcaggagatggtagctgacctggagctgcagcaagacctcatagtgcctctcggccacaccccttcccaggagcacttcctctttgagattttccgcagacggctccaggctctgacaagcgggtggagcgtggctgccagccttcagagacagagggagctgctaatgtacaaacggatcctcctccgcctgccttcgtctgtcctctgcggcagcagcttccaggcagaacagcccatcactgccagatgcgagcagttcttccacttggtcaactctgagatgagaaacttctgctcccacggaggtgccctgacacaggacatcactgcccacttcttcaggggcctcctgaacgcctgtctgcggagcagagacccctccctgatggtcgacttcatactggccaagtgccagacgaaatgccccttaattttgacctctgctctggtgtggtggccgagcctggagcctgtgctgctctgccggtggaggagacactgccagagcccgctgccccgggaactgcagaagctacaagaaggccggcagtttgccagcgatttcctctcccctgaggctgcctccccagcacccaacccggactggctctcagctgctgcactgcactttgcgattcaacaagtcagggaagaaaacatcaggaagcagctaaagaagctggactgcgagagagaggagctattggttttccttttcttcttctccttgatgggcctgctgtcgtcacatctgacctcaaatagcaccacagacctgccaaaggctttccacgtttgtgcagcaatcctcgagtgtttagagaagaggaagatatcctggctggcactctttcagttgacagagagtgacctcaggctggggcggctcctcctccgtgtggccccggatcagcacaccaggctgctgcctttcgctttttacagtcttctctcctacttccatgaagacgcggccatcagggaagaggccttcctgcatgttgctgtggacatgtacttgaagctggtccagctcttcgtggctggggatacaagcacagtttcacctccagctggcaggagcctggagctcaagggtcagggcaaccccgtggaactgataacaaaagctcgtctttttctgctgcagttaatacctcggtgcccgaaaaagagcttctcacacgtggcagagctgctggctgatcgtggggactgcgacccagaggtgagcgccgccctccagagcagacagcaggctgcccctgacgctgacctgtcccaggagcctcatctcttctga

SEQ ID NO: 166 - DNA, 12265 bp, Artificial sequence
  PGK promoter and FancA
tcgcgcgttctcgaggagcttggcccattgcatacgttgtatccatatcataatatgtacatttatattggctcatgtccaacattaccgccatgttgacattgattattgactagttattaatagtaatcaattacggggtcattagttcatagcccatatatggagttccgcgttacataacttacggtaaatggcccgcctggctgaccgcccaacgacccccgcccattgacgtcaataatgacgtatgttcccatagtaacgccaatagggactttccattgacgtcaatgggtggagtatttacgctaaactgcccacttggcagtacatcaagtgtatcatatgccaagtacgccccctattgacgtcaatgacggtaaatggcccgcctggcattatgcccagtacatgaccttatgggactttcctacttggcagtacatctacgtattagtcatcgctattaccatggtgatgcggttttggcagtacatcaatgggcgtggatagcggtttgactcacggggatttccaagtctccaccccattgacgcaaatgggcggtaggcgtgtacggtgggaggtctatataagcagagcttctagattgtacgggagctctctcttcactactcgctgcgtcgagagtgtacgagactctccaggtttggtaagaaatattttatattgttataatgttactatgatccattaacactctgcttatagattgtaagggtgattgcaatgctttctgcataaaactttggttttcttgttaatcaataaaccgacttgattcgagaacctactcatatattattgtctcttttatactttattaagtaaaaggatttgtatattagccttgctaagggagacatctagtgatataagtgtgaactacacttatcttaaatgatgtaactccttaggataatcaatatacaaaattccatgacaattggcgcccaacgtggggctcgaatataagtcgggtttatttgtaaattatccctagggacctccgagcatagcgggaggcatataaaagccaatagacaatggctagcaggaagtaatgttgaagaatatgaacttgatgttgaagctctggttgtaattttaagagatagaaatataccaagaaatcctttacatggagaagttataggtcttcgccttactgaaggatggtggggacaaattgagagatttcagatggtacgttgattcgaattaaggctatggatttggccatgggacaagaaatattagtttatagtcccattgtatctatgactaaaatacaaaaaactccactaccagaaagaaaagctttacccattagatggataacatggatgacttatttagaagatccaagaatccaatttcattatgataaaaccttaccagaacttaagcatattccagatgtatatacatctagtcagtctcctgttaaacatccttctcaatatgaaggagtgttttatactgatggctcggccatcaaaagtcctgatcctacaaaaagcaataatgctggcatgggaatagtacatgccacatacaaacctgaatatcaagttttgaatcaatggtcaataccactaggtaatcatactgctcagatggctgaaatagctgcagttgaatttgcctgtaaaaaagctttaaaaatacctggtcctgtattagttataactgatagtttctatgtagcagaaagtgctaataaagaattaccatactggaaatctaatgggtttgttaataataagaaaaagcctcttaaacatatctccaaatggaaatctattgctgagtgtttatctatgaaaccagacattactattcaacatgaaaaaggcatcagcctacaaataccagtattcatactgaaaggcaatgccctagcagataagcttgccacccaaggaagttatgtggttaattgtaataccaaaaaaccaaacctggatgcagagttggatcaattattacagggtcattatataaaaggatatcccaaacaatatacatattttttagaagatggcaaagtaaaagtttccagacctgaaggggttaaaattattccccctcagtcagacagacaaaaaattgtgcttcaagcccacaatttggctcacaccggacgtgaagccactcttttaaaaattgccaacctttattggtggccaaatatgagaaaggatgtggttaaacaactaggacgctgtcaacagtgtttaatcacaaatgcttccaacaaagcctctggtcctattctaagaccagataggcctcaaaaaccttttgataaattctttattgactatattggacctttgccaccttcacagggatacctatatgtattagtagttgttgatggaatgacaggattcacttggttataccccactaaggctccttctactagcgcaactgttaaatctctcaatgtactcactagtattgcaattccaaaggtgattcactctgatcaaggtgcagcattcacttcttcaacctttgctgaatgggcaaaggaaagaggtatacatttggaattcagtactccttatcacccccaaagtggtagtaaggtggaaaggaaaaatagtgatataaaacgacttttaactaaactgctagtaggaagacccacaaagtggtatgacctattgcctgttgtacaacttgctttaaacaacacctatagccctgtattaaaatatactccacatcaactcttatttggtatagattcaaatactccatttgcaaatcaagatacacttgacttgaccagagaagaagaactttctcttttacaggaaattcgtacttctttataccatccatccacccctccagcctcctctcgttcctggtctcctgttgttggccaattggtccaggagagggtggctaggcctgcttctttgagacctcgttggcataaaccgtctactgtacttaaggtgttgaatccaaggactgttgttattttggaccatcttggcaacaacagaactgtaagtatagataatttaaaacctacttctcatcagaatggcaccaccaatgacactgcaacaatggatcatttggaaaaaaatgaataaagcgcatgaggcacttcaaaatacaacaactgtgactgaacagcagaaggaacaaattatactggacattcaaaatgaagaagtacaaccaactaggagagataaatttagatatctgctttatacttgttgtgctactagctcaagagtattggcctggatgtttttagtttgtatattgttaatcattgttttggtttcatgctttgtgactatatccagaatacaatggaataaggatattcaggtattaggacctgtaatagactggaatgttactcaaagagctgtttatcaacccttacagactagaaggattgcacgttcccttagaatgcagcatcctgttccaaaatatgtggaggtaaatatgactagtattccacaaggtgtatactatgaaccccatccggcgcgccagatctgcatgccacggggttggggttgcgccttttccaaggcagccctgggtttgcgcagggacgcggctgctctgggcgtggttccgggaaacgcagcggcgccgaccctgggtctcgcacattcttcacgtccgttcgcagcgtcacccggatcttcgccgctacccttgtgggccccccggcgacgcttcctgctccgcccctaagtcgggaaggttccttgcggttcgcggcgtgccggacgtgacaaacggaagccgcacgtctcactagtaccctcgcagacggacagcgccagggagcaatggcagcgcgccgaccgcgatgggctgtggccaatagcggctgctcagcggggcgcgccgagagcagcggccgggaaggggcggtgcgggaggcggggtgtggggcggtagtgtgggccctgttcctgcccgcgcggtgttccgcattctgcaagcctccggagcgcacgtcggcagtcggctccctcgttgaccgaatcaccgacctctctccccagggggatccaccggtccgccaaggccatgtccgactcgtgggtcccgaactccgcctcgggccaggacccagggggccgccggagggcctgggccgagctgctggcgggaagggtcaagagggaaaaatataatcctgaaagggcacagaaattaaaggaatcagctgtgcgcctcctgcgaagccatcaggacctgaatgcccttttgcttgaggtagaaggtccactgtgtaaaaaattgtctctcagcaaagtgattgactgtgacagttctgaggcctatgctaatcattctagttcatttataggctctgctttgcaggatcaagcctcaaggctgggggttcccgtgggtattctctcagccgggatggttgcctctagcgtgggacagatctgcacggctccagcggagaccagtcaccctgtgctgctgactgtggagcagagaaagaagctgtcttccctgttagagtttgctcagtatttattggcacacagtatgttctcccgtctttccttctgtcaagaattatggaaaatacagagttctttgttgcttgaagcggtgtggcatcttcacgtacaaggcattgtgagcctgcaagagctgctggaaagccatcccgacatgcatgctgtgggatcgtggctcttcaggaatctgtgctgcctttgtgaacagatggaagcatcctgccagcatgctgacgtcgccagggccatgctttctgattttgttcaaatgtttgttttgaggggatttcagaaaaactcagatctgagaagaactgtggagcctgaaaaaatgccgcaggtcacggttgatgtactgcagagaatgctgatttttgcacttgacgctttggctgctggagtacaggaggagtcctccactcacaagatcgtgaggtgctggttcggagtgttcagtggacacacgcttggcagtgtaatttccacagatcctctgaagaggttcttcagtcataccctgactcagatactcactcacagccctgtgctgaaagcatctgatgctgttcagatgcagagagagtggagctttgcgcggacacaccctctgctcacctcactgtaccgcaggctctttgtgatgctgagtgcagaggagttggttggccatttgcaagaagttctggaaacgcaggaggttcactggcagagagtgctctcctttgtgtctgccctggttgtctgctttccagaagcgcagcagctgcttgaagactgggtggcgcgtttgatggcccaggcattcgagagctgccagctggacagcatggtcactgcgttcctggttgtgcgccaggcagcactggagggcccctctgcgttcctgtcatatgcagactggttcaaggcctcctttgggagcacacgaggctaccatggctgcagcaagaaggccctggtcttcctgtttacgttcttgtcagaactcgtgccttttgagtctccccggtacctgcaggtgcacattctccacccacccctggttcccagcaagtaccgctccctcctcacagactacatctcattggccaagacacggctggccgacctcaaggtttctatagaaaacatgggactctacgaggatttgtcatcagctggggacattactgagccccacagccaagctcttcaggatgttgaaaaggccatcatggtgtttgagcatacggggaacatcccagtcaccgtcatggaggccagcatattcaggaggccttactacgtgtcccacttcctccccgccctgctcacacctcgagtgctccccaaagtccctgactcccgtgtggcgtttatagagtctctgaagagagcagataaaatccccccatctctgtactccacctactgccaggcctgctctgctgctgaagagaagccagaagatgcagccctgggagtgagggcagaacccaactctgctgaggagcccctgggacagctcacagctgcactgggagagctgagagcctccatgacagaccccagccagcgtgatgttatatcggcacaggtggcagtgatttctgaaagactgagggctgtcctgggccacaatgaggatgacagcagcgttgagatatcaaagattcagctcagcatcaacacgccgagactggagccacgggaacacattgctgtggacctcctgctgacgtctttctgtcagaacctgatggctgcctccagtgtcgctcccccggagaggcagggtccctgggctgccctcttcgtgaggaccatgtgtggacgtgtgctccctgcagtgctcacccggctctgccagctgctccgtcaccagggcccgagcctgagtgccccacatgtgctggggttggctgccctggccgtgcacctgggtgagtccaggtctgcgctcccagaggtggatgtgggtcctcctgcacctggtgctggccttcctgtccctgcgctctttgacagcctcctgacctgtaggacgagggattccttgttcttctgcctgaaattttgtacagcagcaatttcttactctctctgcaagttttcttcccagtcacgagatactttgtgcagctgcttatctccaggccttattaaaaagtttcagttcctcatgttcagattgttctcagaggcccgacagcctctttctgaggaggacgtagccagcctttcctggagacccttgcaccttccttctgcagactggcagagagctgccctctctctctggacacacagaaccttccgagaggtgttgaaagaggaagatgttcacttaacttaccaagactggttacacctggagctggaaattcaacctgaagctgatgctctttcagatactgaacggcaggacttccaccagtgggcgatccatgagcactttctccctgagtcctcggcttcagggggctgtgacggagacctgcaggctgcgtgtaccattcttgtcaacgcactgatggatttccaccaaagctcaaggagttatgaccactcagaaaattctgatttggtctttggtggccgcacaggaaatgaggatattatttccagattgcaggagatggtagctgacctggagctgcagcaagacctcatagtgcctctcggccacaccccttcccaggagcacttcctctttgagattttccgcagacggctccaggctctgacaagcgggtggagcgtggctgccagccttcagagacagagggagctgctaatgtacaaacggatcctcctccgcctgccttcgtctgtcctctgcggcagcagcttccaggcagaacagcccatcactgccagatgcgagcagttcttccacttggtcaactctgagatgagaaacttctgctcccacggaggtgccctgacacaggacatcactgcccacttcttcaggggcctcctgaacgcctgtctgcggagcagagacccctccctgatggtcgacttcatactggccaagtgccagacgaaatgccccttaattttgacctctgctctggtgtggtggccgagcctggagcctgtgctgctctgccggtggaggagacactgccagagcccgctgccccgggaactgcagaagctacaagaaggccggcagtttgccagcgatttcctctcccctgaggctgcctccccagcacccaacccggactggctctcagctgctgcactgcactttgcgattcaacaagtcagggaagaaaacatcaggaagcagctaaagaagctggactgcgagagagaggagctattggttttccttttcttcttctccttgatgggcctgctgtcgtcacatctgacctcaaatagcaccacagacctgccaaaggctttccacgtttgtgcagcaatcctcgagtgtttagagaagaggaagatatcctggctggcactctttcagttgacagagagtgacctcaggctggggcggctcctcctccgtgtggccccggatcagcacaccaggctgctgcctttcgctttttacagtcttctctcctacttccatgaagacgcggccatcagggaagaggccttcctgcatgttgctgtggacatgtacttgaagctggtccagctcttcgtggctggggatacaagcacagtttcacctccagctggcaggagcctggagctcaagggtcagggcaaccccgtggaactgataacaaaagctcgtctttttctgctgcagttaatacctcggtgcccgaaaaagagcttctcacacgtggcagagctgctggctgatcgtggggactgcgacccagaggtgagcgccgccctccagagcagacagcaggctgcccctgacgctgacctgtcccaggagcctcatctcttctgacgggacctgccactgcacaccagcccagctcccgtgtaaataatttattacaagcataacatggagctcttgttgcactaaaaagtggattacaaatctcctcgactgctttagtggggaaaggaatcaattatttatgaactgtccggccccgagtcactcagcgtttgcgggaaaataaaccactggtcccagagcagaggaaggctacttgagccggacaccaagcccgcctccagcaccaagggcgggcagcaccctccgaccctcccatgcgggtgcacacgaagggtgaggctgacacagccactgcggagtccaggctgctagaggtgctcatcctcactgccgtcctcaggtgggttcgggcttcaccgcctggccctctgtggtcacagaggggctcggtggcccaggtggtggttccgcctccaggggcagggccttgtcctgggtctgtgtcagcgggtgcaccatggacatgtgtacaagtaaagcggccgcgtcgagggctgcaggaattcgagcatcttaccgccatttattcccatatttgttctgtttttcttgatttgggtatacatttaaatgttaataaaacaaaatggtggggcaatcatttacatttttagggatatgtaattactagttcaggtgtattgccacaagacaaacatgttaagaaactttcccgttatttacgctctgttcctgttaatcaacctctggattacaaaatttgtgaaagattgactgatattcttaactatgttgctccttttacgctgtgtggatatgctgctttatagcctctgtatctagctattgcttcccgtacggctttcgttttctcctccttgtataaatcctggttgctgtctcttttagaggagttgtggcccgttgtccgtcaacgtggcgtggtgtgctctgtgtttgctgacgcaacccccactggctggggcattgccaccacctgtcaactcctttctgggactttcgctttccccctcccgatcgccacggcagaactcatcgccgcctgccttgcccgctgctggacaggggctaggttgctgggcactgataattccgtggtgttgtcggggaagctgacgtcctttcgaattcgatatcaagcttatcgataccgtcgacggttaccaagcagctatggaagcttatggacctcagagaggaagtaacgaggagagggtgtggtggaatgccactagaaaccagggaaaacaaggaggagagtattacagggaaggaggtgaagaacctcattacccaaatactcctgctcctcatagacgtacctgggatgagagacacaaggttcttaaattgtcctcattcgctactccctctgacatccaacgctgggctactaactctagattgtacgggagctctcttcactactcgctgcgtcgagagtgtacgagactctccaggtttggtaagaaatattttatattgttataatgttactatgatccattaacactctgcttatagattgtaagggtgattgcaatgctttctgcataaaactttggttttcttgttaatcaataaaccgacttgattcgagaacctactcatatattattgtctcttttatactttattaagtaaaaggatttgtatattagccttgctaagggagacatctagtgatataagtgtgaactacacttatcttaaatgatgtaactccttaggataatcaatatacaaaattccatgacaattggcgatacccagctgcgctcttccgcttcctcgctcactgactcgctgcgctcggtcgttcggctgcggcgagcggtatcagctcactcaaaggcggtaatacggttatccacagaatcaggggataacgcaggaaagaacatgtgagcaaaaggccagcaaaaggccaggaaccgtaaaaaggccgcgttgctggcgtttttccataggctccgcccccctgacgagcatcacaaaaatcgacgctcaagtcagaggtggcgaaacccgacaggactataaagataccaggcgtttccccctggaagctccctcgtgcgctctcctgttccgaccctgccgcttaccggatacctgtccgcctttctcccttcgggaagcgtggcgctttctcatagctcacgctgtaggtatctcagttcggtgtaggtcgttcgctccaagctgggctgtgtgcacgaaccccccgttcagcccgaccgctgcgccttatccggtaactatcgtcttgagtccaacccggtaagacacgacttatcgccactggcagcagccactggtaacaggattagcagagcgaggtatgtaggcggtgctacagagttcttgaagtggtggcctaactacggctacactagaagaacagtatttggtatctgcgctctgctgaagccagttaccttcggaaaaagagttggtagctcttgatccggcaaacaaaccaccgctggtagcggtggtttttttgtttgcaagcagcagattacgcgcagaaaaaaaggatctcaagaagatcctttgatcttttctacggggtctgacgctcagtggaacgaaaactcacgttaagggattttggtcatgagattatcaaaaaggatcttcacctagatccttttaaattaaaaatgaagttttaaatcaatctaaagtatatatgagtaaacttggtctgacagttaccaatgcttaatcagtgaggcacctatctcagcgatctgtctatttcgttcatccatagttgcctgactccccgtcgtgtagataactacgatacgggagggcttaccatctggccccagtgctgcaatgataccgcgagacccacgctcaccggctccagatttatcagcaataaaccagccagccggaagggccgagcgcagaagtggtcctgcaactttatccgcctccatccagtctattaattgttgccgggaagctagagtaagtagttcgccagttaatagtttgcgcaacgttgttgccattgctacaggcatcgtggtgtcacgctcgtcgtttggtatggcttcattcagctccggttcccaacgatcaaggcgagttacatgatcccccatgttgtgcaaaaaagcggttagctccttcggtcctccgatcgttgtcagaagtaagttggccgcagtgttatcactcatggttatggcagcactgcataattctcttactgtcatgccatccgtaagatgcttttctgtgactggtgagtactcaaccaagtcattctgagaatagtgtatgcggcgaccgagttgctcttgcccggcgtcaatacgggataataccgcgccacatagcagaactttaaaagtgctcatcattggaaaacgttcttcggggcgaaaactctcaaggatcttaccgctgttgagatccagttcgatgtaacccactcgtgcacccaactgatcttcagcatcttttactttcaccagcgtttctgggtgagcaaaaacaggaaggcaaaatgccgcaaaaaagggaataagggcgacacggaaatgttgaatactcatactcttcctttttcaatattattgaagcatttatcagggttattgtctcatgagcggatacatatttgaatgtatttagaaaaataaacaaataggggttccgcgcacatttccccgaaaagtgccacctgacgtctaagaaaccattattatcatgacattaacctataaaaataggcgtatcacgaggccctttcgtc

SEQ ID NO: 167 - protein, 361 aa, Artificial sequence
  EF1a-VH-4 CD33-CD8 TM-41BB-CD3 zeta
MLLLVTSLLLCELPHPAFLLIPEVQLVESGGGLVQPGGSLRLSCAASGFTFSSYGMSWVRQAPRQGLEWVANIKQDGSEKYYADSVKGRFTISRDNSKNTLYLQMNSLRAEDTATYYCAKENVDWGQGTLVTVSSAAATTTPAPRPPTPAPTIASQPLSLRPEACRPAAGGAVHTRGLDFACDIYIWAPLAGTCGVLLLSLVITLYCKRGRKKLLYIFKQPFMRPVQTTQEEDGCSCRFPEEEEGGCELRVKFSRSADAPAYQQGQNQLYNELNLGRREEYDVLDKRRGRDPEMGGKPRRKNPQEGLYNELQKDKMAEAYSEIGMKGERRRGKGHDGLYQGLSTATKDTYDALHMQALPPR

SEQ ID NO: 168 - protein, 367 aa, Artificial sequence
  EF1a VH-2 CD33-CD8 TM-41BB-CD3 zeta
MLLLVTSLLLCELPHPAFLLIPEVQLVESGGGLVQPGGSLRLSCAASGFTFSSYGMSWVRQAPRKGLEWIGEINHSGSTNYNPSLKSRVTISRDNSKNTLYLQMNSLRAEDTATYYCARPLNYYYYYMDVWGKGTTVTVSSAAATTTPAPRPPTPAPTIASQPLSLRPEACRPAAGGAVHTRGLDFACDIYIWAPLAGTCGVLLLSLVITLYCKRGRKKLLYIFKQPFMRPVQTTQEEDGCSCRFPEEEEGGCELRVKFSRSADAPAYQQGQNQLYNELNLGRREEYDVLDKRRGRDPEMGGKPRRKNPQEGLYNELQKDKMAEAYSEIGMKGERRRGKGHDGLYQGLSTATKDTYDALHMQALPPR

SEQ ID NO: 169 - protein, 359 aa, Macaca mulatta
MPLLLLPLLWAGALAMDPRVRLEVQESVTVQEGLCVLVPCTFFHPVPYHTRNSPVHGYWFREGAIVSLDSPVATNKLDQEVREETQGRFRLLGDPSRNNCSLSIVDTRRRDNGSYFFRMEKGSTKYSYKSTQLSVHVTDLTHRPQILIPGALDPDHSKNLTCSVPWACEQGTPPIFSWMSAAPTSLGLRTTHSSVLIITPRPQDHGTNLTCQVKFPGAGVTTERTIQLNVSYASQNPRTDIFLGDGSGKQGVVQGAIGGAGVTVLLALCLCLIFFTVKTHRRKAARTAVGRIDTHPATGPTSSKHQKKSKLHGATETSGCSGTTLTVEMDEELHYASLNFHGMNPSEDTSTEYSEVRTQ

SEQ ID NO: 170 - protein, 359 aa, Macaca fascicularis
MPLLLLPLLWAGALAMDPRVRLEVQESVTVQEGLCVLVPCTFFHPVPYHTRNSPVHGYWFREGAIVSLDSPVATNKLDQEVQEETQGRFRLLGDPSRNNCSLSIVDARRRDNGSYFFRMEKGSTKYSYKSTQLSVHVTDLTHRPQILIPGALDPDHSKNLTCSVPWACEQGTPPIFSWMSAAPTSLGLRTTHSSVLIITPRPQDHGTNLTCQVKFPGAGVTTERTIQLNVSYASQNPRTDIFLGDGSGKQGVVQGAIGGAGVTVLLALCLCLIFFTVKTHRRKAARTAVGRIDTHPATGPTSSKHQKKSKLHGATETSGCSGTTLTVEMDEELHYASLNFHGMNPSEDTSTEYSEVRTQ

SEQ ID NO: 171 - protein, 403 aa, Mus musculus
MLWPLPLFLLCAGSLAQDLEFQLVAPESVTVEEGLCVHVPCSVFYPSIKLTLGPVTGSWLRKGVSLHEDSPVATSDPRQLVQKATQGRFQLLGDPQKHDCSLFIRDAQKNDTGMYFFRVVREPFVRYSYKKSQLSLHVTSLSRTPDIIIPGTLEAGYPSNLTCSVPWACEQGTPPTFSWMSTALTSLSSRTTDSSVLTFTPQPQDHGTKLTCLVTFSGAGVTVERTIQLNVTRKSGQMRELVLVAVGEATVKLLILGLCLVFLIVMFCRRKTTKLSVHMGCENPIKRQEAITSYNHCLSPTASDAVTPGCSIHRLISRTPRCTAILRIQDPYRRTHLRNRAVSTLRFPWISWEGSLRSTQRSKCTKLCSPVKNLCPLWLPVDNSCIPLIPEWVMLLCVSLTLS

SEQ ID NO: 172 - DNA, 37638 bp, Artificial Sequence
  Ad35E4PS2/WL-ps2
  misc_feature (2582)..(2759): Ad35 1-->178
  misc_feature (2768)..(2801): loxP
  misc_feature (2808)..(2933): Ad35 366-->481
  misc_feature (2924)..(2957): loxP
  misc_feature (2966)..(27288): Ad35 3112-->27435
  misc_feature (27343)..(29812): lambda-1
  misc_feature (30126)..(30340): BGH polyA
  misc_feature (30365)..(31030): copGFP
  misc_feature (31077)..(31729): CMV
  misc_feature (31781)..(33310): lambda-2
  misc_feature (33371)..(34706): Ad35 30544-->31879
  misc_feature (34702)..(35816): Ad5E4orf6
  misc_feature (35814)..(37636): Ad35 32972-->34794
taaacttggcgcgccctgagtgatttttctctggtcccgccgcatccataccgccagttgtttaccctcacaacgttccagtaaccgggcatgttcatcatcagtaacccgtatcgtgagcatcctctctcgtttcatcggtatcattacccccatgaacagaaatcccccttacacggaggcatcagtgaccaaacaggaaaaaaccgcccttaacatggcccgctttatcagaagccagacattaacgcttctggagaaactcaacgagctggacgcggatgaacaggcagacatctgtgaatcgcttcacgaccacgctgatgagctttaccgcagctgcctcgcgcgtttcggtgatgacggtgaaaacctctgacacatgcagctcccggagacggtcacagcttgtctgtaagcggatgccgggagcagacaagcccgtcagggcgcgtcagcgggtgttggcgggtgtcggggcgcagccatgacccagtcacgtagcgatagcggagtgtatactggcttaactatgcggcatcagagcagattgtactgagagtgcaccatatgcggtgtgaaataccgcacagatgcgtaaggagaaaataccgcatcaggcgctcttccgcttcctcgctcactgactcgctgcgctcggtcgttcggctgcggcgagcggtatcagctcactcaaaggcggtaatacggttatccacagaatcaggggataacgcaggaaagaacatgtgagcaaaaggccagcaaaaggccaggaaccgtaaaaaggccgcgttgctggcgtttttccataggctccgcccccctgacgagcatcacaaaaatcgacgctcaagtcagaggtggcgaaacccgacaggactataaagataccaggcgtttccccctggaagctccctcgtgcgctctcctgttccgaccctgccgcttaccggatacctgtccgcctttctcccttcgggaagcgtggcgctttctcatagctcacgctgtaggtatctcagttcggtgtaggtcgttcgctccaagctgggctgtgtgcacgaaccccccgttcagcccgaccgctgcgccttatccggtaactatcgtcttgagtccaacccggtaagacacgacttatcgccactggcagcagccactggtaacaggattagcagagcgaggtatgtaggcggtgctacagagttcttgaagtggtggcctaactacggctacactagaaggacagtatttggtatctgcgctctgctgaagccagttaccttcggaaaaagagttggtagctcttgatccggcaaacaaaccaccgctggtagcggtggtttttttgtttgcaagcagcagattacgcgcagaaaaaaaggatctcaagaagatcctttgatcttttctacggggtctgacgctcagtggaacgaaaactcacgttaagggattttggtcatgagattatcaaaaaggatcttcacctagatccttttaaattaaaaatgaagttttaaatcaatctaaagtatatatgagtaaacttggtctgacagttaccaatgcttaatcagtgaggcacctatctcagcgatctgtctatttcgttcatccatagttgcctgactccccgtcgtgtagataactacgatacgggagggcttaccatctggccccagtgctgcaatgataccgcgagacccacgctcaccggctccagatttatcagcaataaaccagccagccggaagggccgagcgcagaagtggtcctgcaactttatccgcctccatccagtctattaattgttgccgggaagctagagtaagtagttcgccagttaatagtttgcgcaacgttgttgccattgctgcaggcatcgtggtgtcacgctcgtcgtttggtatggcttcattcagctccggttcccaacgatcaaggcgagttacatgatcccccatgttgtgcaaaaaagcggttagctccttcggtcctccgatcgttgtcagaagtaagttggccgcagtgttatcactcatggttatggcagcactgcataattctcttactgtcatgccatccgtaagatgcttttctgtgactggtgagtactcaaccaagtcattctgagaatagtgtatgcggcgaccgagttgctcttgcccggcgtcaacacgggataataccgcgccacatagcagaactttaaaagtgctcatcattggaaaacgttcttcggggcgaaaactctcaaggatcttaccgctgttgagatccagttcgatgtaacccactcgtgcacccaactgatcttcagcatcttttactttcaccagcgtttctgggtgagcaaaaacaggaaggcaaaatgccgcaaaaaagggaataagggcgacacggaaatgttgaatactcatactcttcctttttcaatattattgaagcatttatcagggttattgtctcatgagcggatacatatttgaatgtatttagaaaaataaacaaataggggttccgcgcacatttccccgaaaagtgccacctgtctagctacgatatcctgtttaaacatcatcaataatataccttatagatggaatggtgccaatatgtaaatgaggtgattttaaaaagtgtgggccgtgtggtgattggctgtggggttaacggttaaaaggggcggcgcggccgtgggaaaatgacgttttatgggggtggagtttttttgcaagttgtcgcgggaaatgatttaaatataacttcgtatagcatacattatacgaagttatggatcctagactttgacccattacgtggaggtttcgattaccgtgttttttacctgaatttccgcgtaccgtgtcaaagtcttctgtttttacgtaggtgtcagctgatcgctagggtatttataacttcgtatagcatacattatacgaagttatatttaaataggaatgtttatgccttaccagtgtaacatgaatcatgtgaaagtgttgttggaaccagatgccttttccagaatgagcctaacaggaatctttgacatgaacacgcaaatctggaagatcctgaggtatgatgatacgagatcgagggtgcgcgcatgcgaatgcggaggcaagcatgccaggttccagccggtgtgtgtagatgtgaccgaagatctcagaccggatcatttggttattgcccgcactggagcagagttcggatccagtggagaagaaactgactaaggtgagtattgggaaaactttggggtgggattttcagatggacagattgagtaaaaatttgttttttctgtcttgcagctgacatgagtggaaatgcttcttttaaggggggagtcttcagcccttatctgacagggcgtctcccatcctgggcaggagttcgtcagaatgttatgggatctactgtggatggaagacccgttcaacccgccaattcttcaacgctgacctatgctactttaagttcttcacctttggacgcagctgcagccgctgccgccgcctctgtcgccgctaacactgtgcttggaatgggttactatggaagcatcgtggctaattccacttcctctaataacccttctacactgactcaggacaagttacttgtccttttggcccagctggaggctttgacccaacgtctgggtgaactttctcagcaggtggccgagttgcgagtacaaactgagtctgctgtcggcacggcaaagtctaaataaaaaaaattccagaatcaatgaataaataaacgagcttgttgttgatttaaaatcaagtgtttttatttcatttttcgcgcacggtatgccctggaccaccgatctcgatcattgagaactcggtggattttttccagaatcctatagaggtgggattgaatgtttagatacatgggcattaggccgtctttggggtggagatagctccattgaagggattcatgctccggggtagtgttgtaaatcacccagtcataacaaggtcgcagtgcatggtgttgcacaatatcttttagaagtaggctgattgccacagataagcccttggtgtaggtgtttacaaaccggttgagctgggaggggtgcattcgaggtgaaattatgtgcattttggattggatttttaagttggcaatattgccgccaagatcccgtcttgggttcatgttatgaaggactaccaagacggtgtatccggtacatttaggaaatttatcgtgcagcttggatggaaaagcgtggaaaaatttggagacacccttgtgtcctccgagattttccatgcactcatccatgataatagcaatggggccgtgggcagcggcgcgggcaaacacgttccgtgggtctgacacatcatagttatgttcctgagttaaatcatcataagccattttaatgaatttggggcggagcgtaccagattggggtatgaatgttccttcgggccccggagcatagttcccctcacagatttgcatttcccaagctttcagttctgagggtggaatcatgtccacctggggggctatgaagaacaccgtttcgggggcgggggtgattagttgggatgatagcaagtttctgagcaattgagatttgccacatccggtggggccataaataattccgattacaggttgcaggtggtagtttagggaacggcaactgccgtcttctcgaagcaagggggccacctcgttcatcatttcccttacatgcatattttcccgcaccaaatccattaggaggcgctctcctcctagtgatagaagttcttgtagtgaggaaaagtttttcagcggttttagaccgtcagccatgggcattttggaaagagtttgctgcaaaagttctagtctgttccacagttcagtgatgtgttctatggcatctcgatccagcagacctcctcgtttcgcgggtttggacggctcctggagtagggtatgagacgatgggcgtccagcgctgccagggttcggtccttccagggtctcagtgttcgagtcagggttgtttccgtcacagtgaaggggtgtgcgcctgcttgggcgcttgccagggtgcgcttcagactcattctgctggtggagaacttctgtcgcttggcgccctgtatgtcggccaagtagcagtttaccatgagttcgtagttgagcgcctcggctgcgtggcctttggcgcggagcttacctttggaagttttcttgcataccgggcagtataggcatttcagcgcatacagcttgggcgcaaggaaaatggattctggggagtatgcatccgcgccgcaggaggcgcaaacagtttcacattccaccagccaggttaaatccggttcattggggtcaaaaacaagttttccgccatattttttgatgcgtttcttacctttggtctccataagttcgtgtcctcgttgagtgacaaacaggctgtccgtatctccgtagactgattttacaggcctcttctccagtggagtgcctcggtcttcttcgtacaggaactctgaccactctgatacaaaggcgcgcgtccaggccagcacaaaggaggctatgtgggaggggtagcgatcgttgtcaaccagggggtccaccttttccaaagtatgcaaacacatgtcaccctcttcaacatccaggaatgtgattggcttgtaggtgtatttcacgtgacctggggtccccgctgggggggtataaaagggggcggttctttgctcttcctcactgtcttccggatcgctgtccaggaacgtcagctgttggggtaggtattccctctcgaaggcgggcatgacctctgcactcaggttgtcagtttctaagaacgaggaggatttgatattgacagtgccggttgagatgcctttcatgaggttttcgtccatttggtcagaaaacacaatttttttattgtcaagtttggtggcaaatgatccatacagggcgttggataaaagtttggcaatggatcgcatggtttggttcttttccttgtccgcgcgctctttggcggcgatgttgagttggacatactcgcgtgccaggcacttccattcggggaagatagttgttaattcatctggcacgattctcacttgccaccctcgattatgcaaggtaattaaatccacactggtggccacctcgcctcgaaggggttcattggtccaacagagcctacctcctttcctagaacagaaagggggaagtgggtctagcataagttcatcgggagggtctgcatccatggtaaagattcccggaagtaaatccttatcaaaatagctgatgggagtggggtcatctaaggccatttgccattctcgagctgccagtgcgcgctcatatgggttaaggggactgccccagggcatgggatgggtgagagcagaggcatacatgccacagatgtcatagacgtagatgggatcctcaaagatgcctatgtaggttggatagcatcgcccccctctgatacttgctcgcacatagtcatatagttcatgtgatggcgctagcagccccggacccaagttggtgcgattgggtttttctgttctgtagacgatctggcgaaagatggcgtgagaattggaagagatggtgggtctttgaaaaatgttgaaatgggcatgaggtagacctacagagtctctgacaaagtgggcataagattcttgaagcttggttaccagttcggcggtgacaagtacgtctagggcgcagtagtcaagtgtttcttgaatgatgtcataacctggttggtttttcttttcccacagttcgcggttgagaaggtattcttcgcgatccttccagtactcttctagcggaaacccgtctttgtctgcacggtaagatcctagcatgtagaactgattaactgccttgtaagggcagcagcccttctctacgggtagagagtatgcttgagcagcttttcgtagcgaagcgtgagtaagggcaaaggtgtctctgaccatgactttgagaaattggtatttgaagtccatgtcgtcacaggctccctgttcccagagttggaagtctacccgtttcttgtaggcggggttgggcaaagcgaaagtaacatcattgaagagaatcttaccggctctgggcataaaattgcgagtgatgcggaaaggctgtggtacttccgctcgattgttgatcacctgggcagctaggacgatttcgtcgaaaccgttgatgttgtgtcctacgatgtataattctatgaaacgcggcgtgcctctgacgtgaggtagcttactgagctcatcaaaggttaggtctgtggggtcagataaggcgtagtgttcgagagcccattcgtgcaggtgaggatttgcatgtaggaatgatgaccaaagatctaccgccagtgctgtttgtaactggtcccgatactgacgaaaatgccggccaattgccattttttctggagtgacacagtagaaggttctggggtcttgttgccatcgatcccacttgagtttaatggctagatcgtgggccatgttgacgagacgctcttctcctgagagtttcatgaccagcatgaaaggaactagttgtttgccaaaggatcccatccaggtgtaagtttccacatcgtaggtcaggaagagtctttctgtgcgaggatgagagccgatcgggaagaactggatttcctgccaccagttggaggattggctgttgatgtgatggaagtagaagtttctgcggcgcgccgagcattcgtgtttgtgcttgtacagacggccgcagtagtcgcagcgttgcacgggttgtatctcgtgaatgagctgtacctggcttcccttgacgagaaatttcagtgggaagccgaggcctggcgattgtatctcgtgctcttctatattcgctgtatcggcctgttcatcttctgtttcgatggtggtcatgctgacgagcccccgcgggaggcaagtccagacctcggcgcgggaggggcggagctgaaggacgagagcgcgcaggctggagctgtccagagtcctgagacgctgcggactcaggttagtaggtagggacagaagattaacttgcatgatcttttccagggcgtgcgggaggttcagatggtacttgatttccacaggttcgtttgtagagacgtcaatggcttgcagggttccgtgtcctttgggcgccactaccgtacctttgttttttcttttgatcggtggtggctctcttgcttcttgcatgctcagaagcggtgacggggacgcgcgccgggcggcagcggttgttccggacccgggggcatggctggtagtggcacgtcggcgccgcgcacgggcaggttctggtattgcgctctgagaagacttgcgtgcgccaccacgcgtcgattgacgtcttgtatctgacgtctctgggtgaaagctaccggccccgtgagcttgaacctgaaagagagttcaacagaatcaatttcggtatcgttaacggcagcttgtctcagtatttcttgtacgtcaccagagttgtcctggtaggcgatctccgccatgaactgctcgatttcttcctcctgaagatctccgcgacccgctctttcgacggtggccgcgaggtcattggagatacggcccatgagttgggagaatgcattcatgcccgcctcgttccagacgcggctgtaaaccacggccccctcggagtctcttgcgcgcatcaccacctgagcgaggttaagctccacgtgtctggttaagaccgcatagttgcataggcgctgaaaaaggtagttgagtgtggtggcaatgtgttcggcgacgaagaaatacatgatccatcgtctcagcggcatttcgctaacatcgcccagagcttccaagcgctccatggcctcgtagaagtccacggcaaaattaaaaaactgggagtttcgcgcggacacggtcaattcctcctcgagaagacggatgagttcggctatggtggcccgtacttcgcgttcgaaggctcccgggatctcttcttcctcttctatctcttcttccactaacatctcttcttcgtcttcaggcgggggcggagggggcacgcggcgacgtcgacggcgcacgggcaaacggtcgatgaatcgttcaatgacctctccgcggcggcggcgcatggtttcagtgacggcgcggccgttctcgcgcggtcgcagagtaaaaacaccgccgcgcatctccttaaagtggtgactgggaggttctccgtttgggagggagagggcgctgattatacattttattaattggcccgtagggactgcgcgcagagatctgatcgtgtcaagatccacgggatctgaaaacctttcgacgaaagcgtctaaccagtcacagtcacaaggtaggctgagtacggcttcttgtgggcgggggtggttatgtgttcggtctgggtcttctgtttcttcttcatctcgggaaggtgagacgatgctgctggtgatgaaattaaagtaggcagttctaagacggcggatggtggcgaggagcaccaggtctttgggtccggcttgctggatacgcaggcgattggccattccccaagcattatcctgacatctagcaagatctttgtagtagtcttgcatgagccgttctacgggcacttcttcctcacccgttctgccatgcatacgtgtgagtccaaatccgcgcattggttgtaccagtgccaagtcagctacgactctttcggcgaggatggcttgctgtacttgggtaagggtggcttgaaagtcatcaaaatccacaaagcggtggtaagcccctgtattaatggtgtaagcacagttggccatgactgaccagttaactgtctggtgaccagggcgcacgagctcggtgtatttaaggcgcgaataggcgcgggtgtcaaagatgtaatcgttgcaggtgcgcaccagatactggtaccctataagaaaatgcggcggtggttggcggtagagaggccatcgttctgtagctggagcgccaggggcgaggtcttccaacataaggcggtgatagccgtagatgtacctggacatccaggtgattcctgcggcggtagtagaagcccgaggaaactcgcgtacgcggttccaaatgttgcgtagcggcatgaagtagttcattgtaggcacggtttgaccagtgaggcgcgcgcagtcattgatgctctatagacacggagaaaatgaaagcgttcagcgactcgactccgtagcctggaggaacgtgaacgggttgggtcgcggtgtaccccggttcgagacttgtactcgagccggccggagccgcggctaacgtggtattggcactcccgtctcgacccagcctacaaaaatccaggatacggaatcgagtcgttttgctggtttccgaatggcagggaagtgagtcctatttttttttttttttgccgctcagaatgcatcccgtgctgcgacagatgcgcccccaacaacagcccccctcgcagcagcagcagcagcaaccacaaaaggctgtccctgcaactactgcaactgccgccgtgagcggtgcgggacagcccgcctatgatctggacttggaagagggcgaaggactggcacgtctaggtgcgccttcgcccgagcggcatccgcgagttcaactgaaaaaagattctcgcgaggcgtatgtgccccaacagaacctatttagagacagaagcggcgaggagccggaggagatgcgagcttcccgctttaacgcgggtcgtgagctgcgtcacggtttggaccgaagacgagtgttgcgagacgaggatttcgaagttgatgaagtgacagggatcagtcctgccagggcacacgtggctgcagccaaccttgtatcggcttacgagcagacagtaaaggaagagcgtaacttccaaaagtcttttaataatcatgtgcgaaccctgattgcccgcgaagaagttacccttggtttgatgcatttgtgggatttgatggaagctatcattcagaaccctactagcaaacctctgaccgcccagctgtttctggtggtgcaacacagcagagacaatgaggctttcagagaggcgctgctgaacatcaccgaacccgaggggagatggttgtatgatcttatcaacattctacagagtatcatagtgcaggagcggagcctgggcctggccgagaaggtagctgccatcaattactcggttttgagcttgggaaaatattacgctcgcaaaatctacaagactccatacgttcccatagacaaggaggtgaagatagatgggttctacatgcgcatgacgctcaaggtcttgaccctgagcgatgatcttggggtgtatcgcaatgacagaatgcatcgcgcggttagcgccagcaggaggcgcgagttaagcgacagggaactgatgcacagtttgcaaagagctctgactggagctggaaccgagggtgagaattacttcgacatgggagctgacttgcagtggcagcctaatcgcagggctctgagcgccgcgacggcaggatgtgagcttccttacatagaagaggcggatgaaggcgaggaggaagagggcgagtacttggaagactgatggcacaacccgtgttttttgctagatggaacagcaagcaccggatcccgcaatgcgggcggcgctgcagagccagccgtccggcattaactcctcggacgattggacccaggccatgcaacgtatcatggcgttgacgactcgcaaccccgaagcctttagacagcaaccccaggccaaccgtctatcggccatcatggaagctgtagtgccttcccgatctaatcccactcatgagaaggtcctggccatcgtgaacgcgttggtggagaacaaagctattcgtccagatgaggccggactggtatacaacgctctcttagaacgcgtggctcgctacaacagtagcaatgtgcaaaccaatttggaccgtatgataacagatgtacgcgaagccgtgtctcagcgcgaaaggttccagcgtgatgccaacctgggttcgctggtggcgttaaatgctttcttgagtactcagcctgctaatgtgccgcgtggtcaacaggattatactaactttttaagtgctttgagactgatggtatcagaagtacctcagagcgaagtgtatcagtccggtcctgattacttctttcagactagcagacagggcttgcagacggtaaatctgagccaagcttttaaaaaccttaaaggtttgtggggagtgcatgccccggtaggagaaagagcaaccgtgtctagcttgttaactccgaactcccgcctgttattactgttggtagctcctttcaccgacagcggtagcatcgaccgtaattcctatttgggttacctactaaacctgtatcgcgaagccatagggcaaagtcaggtggacgagcagacctatcaagaaattacccaagtcagtcgcgctttgggacaggaagacactggcagtttggaagccactctgaacttcttgcttaccaatcggtctcaaaagatccctcctcaatatgctcttactgcggaggaggagaggatccttagatatgtgcagcagagcgtgggattgtttctgatgcaagagggggcaactccgactgcagcactggacatgacagcgcgaaatatggagcccagcatgtatgccagtaaccgacctttcattaacaaactgctggactacttgcacagagctgccgctatgaactctgattatttcaccaatgccatcttaaacccgcactggctgcccccacctggtttctacacgggcgaatatgacatgcccgaccctaatgacggatttctgtgggacgacgtggacagcgatgttttttcacctctttctgatcatcgcacgtggaaaaaggaaggcggtgatagaatgcattcttctgcatcgctgtccggggtcatgggtgctaccgcggctgagcccgagtctgcaagtccttttcctagtctacccttttctctacacagtgtacgtagcagcgaagtgggtagaataagtcgcccgagtttaatgggcgaagaggagtacctaaacgattccttgctcagaccggcaagagaaaaaaatttcccaaacaatggaatagaaagtttggtggataaaatgagtagatggaagacttatgctcaggatcacagagacgagcctgggatcatggggactacaagtagagcgagccgtagacgccagcgccatgacagacagaggggtcttgtgtgggacgatgaggattcggccgatgatagcagcgtgttggacttgggtgggagaggaaggggcaacccgtttgctcatttgcgccctcgcttgggtggtatgttgtgaaaaaaaataaaaaagaaaaactcaccaaggccatggcgacgagcgtacgttcgttcttctttattatctgtgtctagtataatgaggcgagtcgtgctaggcggagcggtggtgtatccggagggtcctcctccttcgtacgagagcgtgatgcagcagcagcaggcgacggcggtgatgcaatccccactggaggctccctttgtgcctccgcgatacctggcacctacggagggcagaaacagcattcgttactcggaactggcacctcagtacgataccaccaggttgtatctggtggacaacaagtcggcggacattgcttctctgaactatcagaatgaccacagcaacttcttgaccacggtggtgcagaacaatgactttacccctacggaagccagcacccagaccattaactttgatgaacgatcgcggtggggcggtcagctaaagaccatcatgcatactaacatgccaaacgtgaacgagtatatgtttagtaacaagttcaaagcgcgtgtgatggtgtccagaaaacctcccgacggtgctgcagttggggatacttatgatcacaagcaggatattttggaatatgagtggttcgagtttactttgccagaaggcaacttttcagttactatgactattgatttgatgaacaatgccatcatagataattacttgaaagtgggtagacagaatggagtgcttgaaagtgacattggtgttaagttcgacaccaggaacttcaagctgggatgggatcccgaaaccaagttgatcatgcctggagtgtatacgtatgaagccttccatcctgacattgtcttactgcctggctgcggagtggattttaccgagagtcgtttgagcaaccttcttggtatcagaaaaaaacagccatttcaagagggttttaagattttgtatgaagatttagaaggtggtaatattccggccctcttggatgtagatgcctatgagaacagtaagaaagaacaaaaagccaaaatagaagctgctacagctgctgcagaagctaaggcaaacatagttgccagcgactctacaagggttgctaacgctggagaggtcagaggagacaattttgcgccaacacctgttccgactgcagaatcattattggccgatgtgtctgaaggaacggacgtgaaactcactattcaacctgtagaaaaagatagtaagaatagaagctataatgtgttggaagacaaaatcaacacagcctatcgcagttggtatctttcgtacaattatggcgatcccgaaaaaggagtgcgttcctggacattgctcaccacctcagatgtcacctgcggagcagagcaggtttactggtcgcttccagacatgatgaaggatcctgtcactttccgctccactagacaagtcagtaactaccctgtggtgggtgcagagcttatgcccgtcttctcaaagagcttctacaacgaacaagctgtgtactcccagcagctccgccagtccacctcgcttacgcacgtcttcaaccgctttcctgagaaccagattttaatccgtccgccggcgcccaccattaccaccgtcagtgaaaacgttcctgctctcacagatcacgggaccctgccgttgcgcagcagtatccggggagtccaacgtgtgaccgttactgacgccagacgccgcacctgtccctacgtgtacaaggcactgggcatagtcgcaccgcgcgtcctttcaagccgcactttctaaaaaaaaaatgtccattcttatctcgcccagtaataacaccggttggggtctgcgcgctccaagcaagatgtacggaggcgcacgcaaacgttctacccaacatcccgtgcgtgttcgcggacattttcgcgctccatggggtgccctcaagggccgcactcgcgttcgaaccaccgtcgatgatgtaatcgatcaggtggttgccgacgcccgtaattatactcctactgcgcctacatctactgtggatgcagttattgacagtgtagtggctgacgctcgcaactatgctcgacgtaagagccggcgaaggcgcattgccagacgccaccgagctaccactgccatgcgagccgcaagagctctgctacgaagagctagacgcgtggggcgaagagccatgcttagggcggccagacgtgcagcttcgggcgccagcgccggcaggtcccgcaggcaagcagccgctgtcgcagcggcgactattgccgacatggcccaatcgcgaagaggcaatgtatactgggtgcgtgacgctgccaccggtcaacgtgtacccgtgcgcacccgtccccctcgcacttagaagatactgagcagtctccgatgttgtgtcccagcggcgaggatgtccaagcgcaaatacaaggaagaaatgctgcaggttatcgcacctgaagtctacggccaaccgttgaaggatgaaaaaaaaccccgcaaaatcaagcgggttaaaaaggacaaaaaagaagaggaagatggcgatgatgggctggcggagtttgtgcgcgagtttgccccacggcgacgcgtgcaatggcgtgggcgcaaagttcgacatgtgttgagacctggaacttcggtggtctttacacccggcgagcgttcaagcgctacttttaagcgttcctatgatgaggtgtacggggatgatgatattcttgagcaggcggctgaccgattaggcgagtttgcttatggcaagcgtagtagaataacttccaaggatgagacagtgtcaatacccttggatcatggaaatcccacccctagtcttaaaccggtcactttgcagcaagtgttacccgtaactccgcgaacaggtgttaaacgcgaaggtgaagatttgtatcccactatgcaactgatggtacccaaacgccagaagttggaggacgttttggagaaagtaaaagtggatccagatattcaacctgaggttaaagtgagacccattaagcaggtagcgcctggtctgggggtacaaactgtagacattaagattcccactgaaagtatggaagtgcaaactgaacccgcaaagcctactgccacctccactgaagtgcaaacggatccatggatgcccatgcctattacaactgacgccgccggtcccactcgaagatcccgacgaaagtacggtccagcaagtctgttgatgcccaattatgttgtacacccatctattattcctactcctggttaccgaggcactcgctactatcgcagccgaaacagtacctcccgccgtcgccgcaagacacctgcaaatcgcagtcgtcgccgtagacgcacaagcaaaccgactcccggcgccctggtgcggcaagtgtaccgcaatggtagtgcggaacctttgacactgccgcgtgcgcgttaccatccgagtatcatcacttaatcaatgttgccgctgcctccttgcagatatggccctcacttgtcgccttcgcgttcccatcactggttaccgaggaagaaactcgcgccgtagaagagggatgttgggacgcggaatgcgacgctacaggcgacggcgtgctatccgcaagcaattgcggggtggttttttaccagccttaattccaattatcgctgctgcaattggcgcgataccaggcatagcttccgtggcggttcaggcctcgcaacgacattgacattggaaaaaaaacgtataaataaaaaaaaatacaatggactctgacactcctggtcctgtgactatgttttcttagagatggaagacatcaatttttcatccttggctccgcgacacggcacgaagccgtacatgggcacctggagcgacatcggcacgagccaactgaacgggggcgccttcaattggagcagtatctggagcgggcttaaaaattttggctcaaccataaaaacatacgggaacaaagcttggaacagcagtacaggacaggcgcttagaaataaacttaaagaccagaacttccaacaaaaagtagtcgatgggatagcttccggcatcaatggagtggtagatttggctaaccaggctgtgcagaaaaagataaacagtcgtttggacccgccgccagcaaccccaggtgaaatgcaagtggaggaagaaattcctccgccagaaaaacgaggcgacaagcgtccgcgtcccgatttggaagagacgctggtgacgcgcgtagatgaaccgccttcttatgaggaagcaacgaagcttggaatgcccaccactagaccgatagccccaatggccaccggggtgatgaaaccttctcagttgcatcgacccgtcaccttggatttgccccctccccctgctgctactgctgtacccgcttctaagcctgtcgctgccccgaaaccagtcgccgtagccaggtcacgtcccgggggcgctcctcgtccaaatgcgcactggcaaaatactctgaacagcatcgtgggtctaggcgtgcaaagtgtaaaacgccgtcgctgcttttaattaaatatggagtagcgcttaacttgcctatctgtgtatatgtgtcattacacgccgtcacagcagcagaggaaaaaaggaagaggtcgtgcgtcgacgctgagttactttcaagatggccaccccatcgatgctgccccaatgggcatacatgcacatcgccggacaggatgcttcggagtacctgagtccgggtctggtgcagttcgcccgcgccacagacacctacttcaatctgggaaataagtttagaaatcccaccgtagcgccgacccacgatgtgaccaccgaccgtagccagcggctcatgttgcgcttcgtgcccgttgaccgggaggacaatacatactcttacaaagtgcggtacaccctggccgtgggcgacaacagagtgctggatatggccagcacgttctttgacattaggggcgtgttggacagaggtcccagtttcaaaccctattctggtacggcttacaactctctggctcctaaaggcgctccaaatgcatctcaatggattgcaaaaggcgtaccaactgcagcagccgcaggcaatggtgaagaagaacatgaaacagaggagaaaactgctacttacacttttgccaatgctcctgtaaaagccgaggctcaaattacaaaagagggcttaccaataggtttggagatttcagctgaaaacgaatctaaacccatctatgcagataaactttatcagccagaacctcaagtgggagatgaaacttggactgacctagacggaaaaaccgaagagtatggaggcagggctctaaagcctactactaacatgaaaccctgttacgggtcctatgcgaagcctactaatttaaaaggtggtcaggcaaaaccgaaaaactcggaaccgtcgagtgaaaaaattgaatatgatattgacatggaattttttgataactcatcgcaaagaacaaacttcagtcctaaaattgtcatgtatgcagaaaatgtaggtttggaaacgccagacactcatgtagtgtacaaacctggaacagaagacacaagttccgaagctaatttgggacaacagtctatgcccaacagacccaactacattggcttcagagataactttattggactcatgtactataacagtactggtaacatgggggtgctggctggtcaagcgtctcagttaaatgcagtggttgacttgcaggacagaaacacagaactttcttaccaactcttgcttgactctctgggcgacagaaccagatactttagcatgtggaatcaggctgtggacagttatgatcctgatgtacgtgttattgaaaatcatggtgtggaagatgaacttcccaactattgttttccactggacggcataggtgttccaacaaccagttacaaatcaatagttccaaatggagaagataataataattggaaagaacctgaagtaaatggaacaagtgagatcggacagggtaatttgtttgccatggaaattaaccttcaagccaatctatggcgaagtttcctttattccaatgtggctctgtatctcccagactcgtacaaatacaccccgtccaatgtcactcttccagaaaacaaaaacacctacgactacatgaacgggcgggtggtgccgccatctctagtagacacctatgtgaacattggtgccaggtggtctctggatgccatggacaatgtcaacccattcaaccaccaccgtaacgctggcttgcgttaccgatctatgcttctgggtaacggacgttatgtgcctttccacatacaagtgcctcaaaaattcttcgctgttaaaaacctgctgcttctcccaggctcctacacttatgagtggaactttaggaaggatgtgaacatggttctacagagttccctcggtaacgacctgcgggtagatggcgccagcatcagtttcacgagcatcaacctctatgctacttttttccccatggctcacaacaccgcttccacccttgaagccatgctgcggaatgacaccaatgatcagtcattcaacgactacctatctgcagctaacatgctctaccccattcctgccaatgcaaccaatattcccatttccattccttctcgcaactgggcggctttcagaggctggtcatttaccagactgaaaaccaaagaaactccctctttggggtctggatttgacccctactttgtctattctggttctattccctacctggatggtaccttctacctgaaccacacttttaagaaggtttccatcatgtttgactcttcagtgagctggcctggaaatgacaggttactatctcctaacgaatttgaaataaagcgcactgtggatggcgaaggctacaacgtagcccaatgcaacatgaccaaagactggttcttggtacagatgctcgccaactacaacatcggctatcagggcttctacattccagaaggatacaaagatcgcatgtattcatttttcagaaacttccagcccatgagcaggcaggtggttgatgaggtcaattacaaagacttcaaggccgtcgccataccctaccaacacaacaactctggctttgtgggttacatggctccgaccatgcgccaaggtcaaccctatcccgctaactatccctatccactcattggaacaactgccgtaaatagtgttacgcagaaaaagttcttgtgtgacagaaccatgtggcgcataccgttctcgagcaacttcatgtctatgggggcccttacagacttgggacagaatatgctctatgccaactcagctcatgctctggacatgacctttgaggtggatcccatggatgagcccaccctgctttatcttctcttcgaagttttcgacgtggtcagagtgcatcagccacaccgcggcatcatcgaggcagtctacctgcgtacaccgttctcggccggtaacgctaccacgtaagaagcttcttgcttcttgcaaatagcagctgcaaccatggcctgcggatcccaaaacggctccagcgagcaagagctcagagccattgtccaagacctgggttgcggaccctattttttgggaacctacgataagcgcttcccggggttcatggcccccgataagctcgcctgtgccattgtaaatacggccggacgtgagacggggggagagcactggttggctttcggttggaacccacgttctaacacctgctacctttttgatccttttggattctcggatgatcgtctcaaacagatttaccagtttgaatatgagggtctcctgcgccgcagcgctcttgctaccaaggaccgctgtattacgctggaaaaatctacccagaccgtgcagggcccccgttctgccgcctgcggacttttctgctgcatgttccttcacgcctttgtgcactggcctgaccgtcccatggacggaaaccccaccatgaaattgctaactggagtgccaaacaacatgcttcattctcctaaagtccagcccaccctgtgtgacaatcaaaaagcactctaccattttcttaatacccattcgccttattttcgctctcatcgtacacacatcgaaagggccactgcgttcgaccgtatggatgttcaataatgactcatgtaaacaacgtgttcaataaacatcactttatttttttacatgtatcaaggctctggattacttatttatttacaagtcgaatgggttctgacgagaatcagaatgacccgcaggcagtgatacgttgcggaactgatacttgggttgccacttgaattcgggaatcaccaacttgggaaccggtatatcgggcaggatgtcactccacagctttctggtcagctgcaaagctccaagcaggtcaggagccgaaatcttgaaatcacaattaggaccagtgctctgagcgcgagagttgcggtacaccggattgcagcactgaaacaccatcagcgacggatgtctcacgcttgccagcacggtgggatctgcaatcatgcccacatccagatcttcagcattggcaatgctgaacggggtcatcttgcaggtctgcctacccatggcgggcacccaattaggcttgtggttgcaatcgcagtgcagggggatcagtatcatcttggcctgatcctgtctgattcctggatacacggctctcatgaaagcatcatattgcttgaaagcctgctgggctttactaccctcgggataaaacatcccgcaggacctgctcgaaaactggttagcctgcacagccggcatcattcacacagcagcgggcgtcattgttggctatttgcaccacacttctgccccagcggttttgggtgattttggttcgctcgggattctcctttaaggctcgttgtccgttctcgctggccacatccatctcgataatctgctccttctgaatcataatattgccatgcaggcacttcagcttgccctcataatcattgcagccatgaggccacaacgcacagcctgtacattcccaattatggtgggcgatctgagaaaaagaatgtatcattccctgcagaaatcttcccatcatcgtgctcagtgtcttgtgactagtgaaagttaactggatgcctcggtgctcttcgtttacgtactggtgacagatgcgcttgtattgttcgtgttgctcaggcattagtttaaaacaggttctaagttcgttatccagcctgtacttctccatcagcagacacatcacttccatgcctttctcccaagcagacaccaggggcaagctaatcggattcttaacagtgcaggcagcagctcctttagccagagggtcatctttagcgatcttctcaatgcttcttttgccatccttctcaacgatgcgcacgggcgggtagctgaaacccactgctacaagttgcgcctcttctctttcttcttcgctgtcttgactgatgtcttgcatggggatatgtttggtcttccttggcttctttttggggggtatcggaggaggaggactgtcgctccgttccggagacagggaggattgtgacgtttcgctcaccattaccaactgactgtcggtagaagaacctgaccccacacggcgacaggtgtttttcttcgggggcagaggtggaggcgattgcgaagggctgcggtccgacctggaaggcggatgactggcagaaccccttccgcgttcgggggtgtgctccctgtggcggtcgcttaactgatttccttcgcggctggccattgtgttctcctaggcagagaaacaacagacatggaaactcagccattgctgtcaacatcgccacgagtgccatcacatctcgtcctcagcgacgaggaaaaggagcagagcttaagcattccaccgcccagtcctgccaccacctctaccctagaagataaggaggtcgacgcatctcatgacatgcagaataaaaaagcgaaagagtctgagacagacatcgagcaagacccgggctatgtgacaccggtggaacacgaggaagagttgaaacgctttctagagagagaggatgaaaactgcccaaaacagcgagcagataactatcaccaagatgctggaaatagggatcagaacaccgactacctcatagggcttgacggggaagacgcgctccttaaacatctagcaagacagtcgctcatagtcaaggatgcattattggacagaactgaagtgcccatcagtgtggaagagctcagctgcgcctacgagcttaaccttttttcacctcgtactccccccaaacgtcagccaaacggcacctgcgagccaaatcctcgcttaaacttttatccagcttttgctgtgccagaagtactggctacctatcacatcttttttaaaaatcaaaaaattccagtctcctgccgcgctaatcgcacccgcgccgatgccctactcaatctgggacctggttcacgcttacctgatatagcttccttggaagaggttccaaagatcttcgagggtctgggcaataatgagactcgggccgcaaatgctctgcaaaagggagaaaatggcatggatgagcatcacagcgttctggtggaattggaaggcgataatgccagactcgcagtactcaagcgaagcgtcgaggtcacacacttcgcatatcccgctgtcaacctgccccctaaagtcatgacggcggtcatggaccagttactcattaagcgcgcaagtcccctttcagaagacatgcatgacccagatgcctgtgatgagggtaaaccagtggtcagtgatgagcagctaacccgatggctgggcaccgactctccccgggatttggaagagcgtcgcaagcttatgatggccgtggtgctggttaccgtagaactagagtgtctccgacgtttctttaccgattcagaaaccttgcgcaaactcgaagagaatctgcactacacttttagacacggctttgtgcggcaggcatgcaagatatctaacgtggaactcaccaacctggtttcctacatgggtattctgcatgagaatcgcctaggacaaagcgtgctgcacagcacccttaagggggaagcccgccgtgattacatccgcgattgtgtctatctctacctgtgccacacgtggcaaaccggcatgggtgtatggcagcaatgtttagaagaacagaacttgaaagagcttgacaagctcttacagaaatctcttaaggttctgtggacagggttcgacgagcgcaccgtcgcttccgacctggcagacctcatcttcccagagcgtctcagggttactttgcgaaacggattgcctgactttatgagccagagcatgcttaacaattttcgctctttcatcctggaacgctccggtatcctgcccgccacctgctgcgcactgccctccgactttgtgcctctcacctaccgcgagtgccccccgccgctatggagtcactgctacctgttccgtctggccaactatctctcctaccactcggatgtgatcgaggatgtgagcggagacggcttgctggagtgccactgccgctgcaatctgtgcacgccccaccggtccctagcttgcaacccccagttgatgagcgaaacccagataataggcacctttgaattgcaaggccccagcagccaaggcgatgggtcttctcctgggcaaagtttaaaactgaccccgggactgtggacctccgcctacttgcgcaagtttgctccggaagattaccacccctatgaaatcaagttctatgaggaccaatcacagcctccaaaggccgaactttcggcttgcgtcatcacccagggggcaattctggcccaattgcaagccatccaaaaatcccgccaagaatttctactgaaaaagggtaagggggtctaccttgacccccagaccggcgaggaactcaacacaaggttccctcaggatgtcccaacgacgagaaaacaagaagttgaaggtgcagccgccgcccccagaagatatggaggaagattgggacagtcaggcagaggaggcggaggaggacagtctggaggacagtctggaggaagacagtttggaggaggaaaacgaggaggcagaggaggtggaagaagtaaccgccgacaaacagttatcctcggctgcggagacaagcaacagcgctaccatctccgctccgagtcgaggaacccggcggcgtcccagcagtagatgggacgagaccggacgcttcccgaacccaaccagcgcttccaagaccggtaagaaggatcggcagggatacaagtcctggcgggggcataagaatgccatcatctcctgcttgcatgagtgcgggggcaacatatccttcacgcggcgctacttgctattccaccatggggtgaactttccgcgcaatgttttgcattactaccgtcacctccacagcccctactatagccagcaaatcccgacagtctcgacagataaagacagcggcggcgacctccaacagaaaaccagcagcggcagttagaaaatacacaacaagtgcagcaacaggaggattaaagattacagccaacgagccagcgcaaacccgagagttaagaaatcggatctttccaaccctgtatgccatcttccagcagagtcggggtcaagagcaggaactgaaaataaaaaaccgatctctgcgttcgctcaccagaagttgtttgtatcacaagagcgaagatcaacttcagcgcactctcgaggacgccgaggctctcttcaacaagtactgcgcgctgactcttaaagagtaggcagcgaccgcgcttattcaaaaaaggcgggaattacatcatcctcgacatgagtaaagaaattcccacgccttacatgtggagttatcaaccccaaatgggattggcagcaggcgcctcccaggactactccacccgcatgaattggctcagcgccgggccttctatgatttctcgagttaatgatatacgcgcctaccgaaaccaaatacttttggaacagtcagctcttaccaccacgccccgccaacaccttaatcccagaaattggcccgccgccctagtgtaccaggaaagtcccgctcccaccactgtattacttcctcgagacgcccaggccgaagtccaaatgactaatgcaggtgcgcagttagctggcggctccaccctatgtcgtcacaggcctcggcataatataaaacgcctgatgatcagaggccgaggtatccagctcaacgacgagtcggtgagctctccgcttggtctacgaccagacggaatctttcagattgccggctgcgggagatcttccttcacccctcgtcaggctgttctgactttggaaagttcgtcttcgcaaccccgctcgggcggaatcgggaccgttcaatttgtagaggagtttactccctctgtctacttcaaccccttctccggatctcctgggcactacccggacgagttcataccgaacttcgacgcgattagcgagtcagtggacggctacgattgatgtctggtgacgcggctgagctatctcggctgcgacatctagaccactgccgccgctttcgctgctttgcccgggaacttattgagttcatctacttcgaactccccaaggatcaccctcaaggtccggcccacggagtgcggattactatcgaaggcaaaatagactctcgcctgcaacgaattttctcccagcggcccgtgctgatcgagcgagaccagggaaacaccacggttagtaatcaattacggggtcattagttcatagcccatatatggagttgcgatcgctgcgggccatgtcatacaccgccttcagagcagccggacctatctgcccgttcgtgccgtcgttgttaatcaccacatggttattctgctcaaacgtcccggacgcctgcgaccggctgtctgccatgctgcccggtgtaccgacataaccgccggtggcatagccgcgcatcagccggtaaagattccccacgccaatccggctggttgcctccttcgtgaagacaaactcaccacggtgaacaatccccgctggctcatatttgccgccggttcccgtaaatcctccggttgcaaaatggaatttcgccgcagcggcctgaatggctgtaccgcctgacgcggatgcgccgccaccaacagccccgccaatggcgctgccgatactcccgacaatccccaccattgcctgcttaagcagaatttctgtcatcatggacagcacggaacgggtgaagctgcgccagttctgctcactgccggtcagcatcgccgccatattctgtgcaataccatcaaaggtctgcgtggctgcactttttacctgcgacatactgtccgtggcgctctcttcccactcactccagccggacttcaggcctgccatccagttcccgcgaagctggtcttcagccgcccaggtctttttctgctctgacatgacgttattcagcgccagcggattatcgccatactgttccttcaggcgctgttccgtggcttcccgttctgcctgccggtcagtcagcccccggcttttcgcatcaatggcggcccgttttgcccgttgctgctgtgcgaatttatccgcctgctgcgccagcgcgttcaggcgctcctgatacgtaaccttgtcgccaagtgcagccagctggcgtttgtactccagcgtctcatctttatgcgccagcagggatttctcctgtgcagacagctggcgacgttgcgccgcctcctccagtaccgcgaactgactctccgccttccacaaatcccggcgctgctggctgattttctcatttgctccggcatgcttctccagcgtccggagttctgcctgaagcgtcagcagggcagcatgagcactgtcttcctgacgatcgcccgcagacaccttcacgctggactgtttcggctttttcagcgtcgcttcataatcctttttcgccgccgccatcagcgtgttgtaatccgcctgcaggattttcccgtctttcagtgccttgttcagttcttcctgacgggcggtatatttctccagcggcgtctgcagccgttcgtaagccttctgcgcctcttcggtatatttcagccgtgacgcttcggtatcgctctgctgctgcgcatttttgtcctgttgagtctgctgctcagccttctttcgggcggcttcaagcgcaagacgggccttttcacgatcatcccagtaacgcgcccgcgcttcatcgttaacaaaataatcatccttgcgcagattccagatgtcgtctgctttcttatacgcagcctctgccttaatcagcatctcctgcgcggtatcaggacgaccaatatccagcaccgcatcccacatggatttgaatgcccgcgcagtcctgtctgcccaggtctccagcgtgcccatgttctctttcaggcggcgggtctggtcatcaaaccctttcgttgcggcctcgttcgccgcctgcaatgccccggcttcatcgccggaacgctgcaactgagcaacatacgcaatctgctccgccgacacgttatggaactggcgagccatcgccgtcagccccgacgtcgggtctgtggtcagcttcccgaaggcttcagcgaccttgtccacctccacgccggatgcagaggagaaacgcgccacactctggctgatggacgcaatctgagcctcaccgcttacccccgccttaaccagtgcgctgagtgactcgctggtctggttaaacgtcagccctgccgcctgcccggctctggacaggaccagcatacgatctgccgtcagtcccgcctgattgccggaaaggaccagcgttttgttgaaatcggacagggttgagttgccctgataccaggcatacgccagcgcaccggtcgccaccgccagcgaggtggcccccaccatcggcagggtgatcgcaccggcaagccccctgaacatggggatcatcccgccgaaggagtccttcacctgccccccctgttgcagcaggatcagccacggactttgcccgcctgcaagctgcgtggccacgtcggtgaactgtgcaggcagcatacgcatggcggctttatactgcccgacggaaatccccgctttctgtgcagccagcgcctgtcggctcagcgactgttcaacgactgccgctgtttttttcgcatcactttccgtaccagaaaaatgacgcctgactctggccatctgctcgtcaaatctggccgcatccagactcaaatcaacgacgtcgactaagctctagcatttgtgaaccatcaccctaatcaagttttttggggtcgaggtgccgtaaagcactaaatcggaaccctaaagggagcccccgatttagagcttgacggggaaagccggcgaacgtggcgagaaaggaagggaagaaagcgaaaggagcgggcgctagggcgctggcaagtgtagcggtcacgctgcgcgtaaccaccacacccgccgcgcttaatgcgccgctacagggcgcgtggggataccccctagagccccagctggttctttccgcctcagaagccatagagcccaccgcatccccagcatgcctgctattgtcttcccaatcctcccccttgctgtcctgccccaccccaccccccagaatagaatgacacctactcagacaatgcgatgcaatttcctcattttattaggaaaggacagtgggagtggcaccttccagggtcaaggaaggcacgggggaggggcaaacaacagatggctggcaactagaaggcacagtcgaggctgatcagcgggtttgctagcttaggcgaaggcgatgggggtcttgaaggcgtgctggtactccacgatgcccagctcggtgttgctgtgcagctcctccacgcggcggaaggcgaacatggggcccccgttctgcaggatgctggggtggatggcgctcttgaagtgcatgtggctgtccaccacgaagctgtagtagccgccgtcgcgcaggctgaaggtgcgggcgaagctgcccaccagcacgttatcgcccatggggtgcaggtgctccacggtggcgttgctgcggatgatcttgtcggtgaagatcacgctgtcctcggggaagccggtgcccaccaccttgaagtcgccgatcacgcggccggcctcgtagcggtagctgaagctcacgtgcagcacgccgccgtcctcgtacttctcgatgcgggtgttggtgtagccgccgttgttgatggcgtgcaggaaggggttctcgtagccgctggggtaggtgccgaagtggtagaagccgtagcccatcacgtggctcagcaggtaggggctgaaggtcagggcgcctttggtgctcttcatcttgttggtcatgcggccctgctcgggggtgccctctccgccgcccaccagctcgaactccacgccgttcagggtgccggtgatgcggcactcgatcttcatggcgggcatggtggctagcctagccagcttgggtctccctatagtgagtcgtattaatttcgataagccagtaagcagtgggttctctagttagccagagagctctgcttatatagacctcccaccgtacacgcctaccgcccatttgcgtcaatggggcggagttgttacgacattttggaaagtcccgttgattttggtgccaaaacaaactcccattgacgtcaatggggtggagacttggaaatccccgtgagtcaaaccgctatccacgcccattgatgtactgccaaaaccgcatcaccatggtaatagcgatgactaatacgtagatgtactgccaagtaggaaagtcccataaggtcatgtactgggcataatgccaggcgggccatttaccgtcattgacgtcaatagggggcgtacttggcatatgatacacttgatgtactgccaagtgggcagtttaccgtaaatactccacccattgacgtcaatggaaagtccctattggcgttactatgggaacatacgtcattattgacgtcaatgggcgggggtcgttgggcggtcagccaggcgggccatttaccgtaagttatgtaacgcggaactccatatatgggctatgaactaatgaccccgtaattgattactattaataactacaataatcaatgtcaacgcgtatatctggcccgtacatcgcgaagcagcgcaaaacgcctaaccctaagcagattcttcatgcaattaagcttcgcggtgcttcttcagtacgctacggcaaatgtcatcgacgtttttatccggaaactgctgtctggctttttttgatttcagaattagcctgacgggcaatgctgcgaagggcgttttcctgctgaggtgtcattgaacaagtcccatgtcggcaagcataagcacacagaatatgaagcccgctgccagaaaaatgcattccgtggttgtcatacctggtttctctcatctgcttctgctttcgccaccatcatttccagcttttgtgaaagggatgcggctaacgtatgaaattcttcgtctgtttctactggtattggcacaaacctgattccaatttgagcaaggctatgtgccatctcgatactcgttcttaactcaacagaagatgctttgtgcatacagcccctcgtttattatttatctcctcagccagccgctgtgctttcagtggatttcggataacagaaaggccgggaaatacccagcctcgctttgtaacggagtagacgaaagtgattgcgcctacccggatattatcgtgaggatgcgtcatcgccattgctccccaaatacaaaaccaatttcagccagtgcctcgtccattttttcgatgaactccggcacgatctcgtcaaaactcgccatgtacttttcatcccgctcaatcacgacataatgcaggccttcacgcttcatacgcgggtcatagttggcaaagtaccaggcattttttcgcgtcacccacatgctgtactgcacctgggccatgtaagctgactttatggcctcgaaaccaccgagccggaacttcatgaaatcccgggaggtaaacgggcatttcagttcaaggccgttgccgtcactgcataaaccatcgggagagcaggcggtacgcatactttcgtcgcgatagatgatcggggattcagtaacattcacgccggaagtgaattcaaacagggttctggcgtcgttctcgtactgttttccccaggccagtgctttagcgttaacttccggagccacaccggtgcaaacctcagcaagcagggtgtggaagtaggacattttcatgtcaggccacttctttccggagcggggttttgctatcacgttgtgaacttctgaagcggtgatgacgccgagccgtaatttgtgccacgcatcatccccctgttcgacagctctcacatcgatcccggtacgctgcaggataatgtccggtgtcatgctgccaccttctgctctgcggctttctgtttcaggaatccaagagcttttactgcttcggcctgtgtcagttctgacgatgcacgaatgtcgcggcgaaatatctgggaacagagcggcaataagtcgtcatcccatgttttatccagggcgatcagcagagtgttaatctcctgcatggtttcatcgttaaccggagtgatgtcgcgttccggctgacgttctgcagtgtatgcagtattttcgacaatgcgctcggcttcatccttgtcatagataccagcaaatccgaagcggccgcggaacaacaacaattgcattcattttatgtttcaggttcagggggaggtgtggtcctgcgattccatcgagtgcacctacaccctgctgaagaccctatgcggcctaagagacctgctaccaatgaattaaaaaaaaatgattaataaaaaatcacttacttgaaatcagcaataaggtctctgttgaaattttctcccagcagcacctcacttccctcttcccaactctggtattctaaaccccgttcagcggcatactttctccatactttaaaggggatgtcaaattttagctcctctcctgtacccacaatcttcatgtctttcttcccagatgaccaagagagtccggctcagtgactccttcaaccctgtctacccctatgaagatgaaagcacctcccaacaccccttttataacccagggtttatttccccaaatggcttcacacaaagcccagacggagttcttactttaaaatgtttaaccccactaacaaccacaggcggatctctacagctaaaagtgggagggggacttacagtggatgacactgatggtaccttacaagaaaacatacgtgctacagcacccattactaaaaataatcactctgtagaactatccattggaaatggattagaaactcaaaacaataaactatgtgccaaattgggaaatgggttaaaatttaacaacggtgacatttgtataaaggatagtattaacaccttatggactggaataaaccctccacctaactgtcaaattgtggaaaacactaatacaaatgatggcaaacttactttagtattagtaaaaaatggagggcttgttaatggctacgtgtctctagttggtgtatcagacactgtgaaccaaatgttcacacaaaagacagcaaacatccaattaagattatattttgactcttctggaaatctattaactgaggaatcagacttaaaaattccacttaaaaataaatcttctacagcgaccagtgaaactgtagccagcagcaaagcctttatgccaagtactacagcttatcccttcaacaccactactagggatagtgaaaactacattcatggaatatgttactacatgactagttatgatagaagtctatttcccttgaacatttctataatgctaaacagccgtatgatttcttccaatgttgcctatgccatacaatttgaatggaatctaaatgcaagtgaatctccagaaagcaacatagctacgctgaccacatccccctttttcttttcttacattacagaagacgacaactaaaataaagtttaagtgtttttatttaaaatcacaaaattcgagtagttattttgcctccaccttcccatttgacagaatacacagtcctttctccccggctggccttaaaaagcatcatatcatgggtaacagacatattcttaggtgttatattccacacggtttcctgtcgagccaaacgctcatcagtgatattaataaactccccgggcagctcacttaagttcatgtcgctgtccagctgctgagccacaggctgctgtccaacttgcggttgcttaacgggcggcgaaggagaagtccacgcctacatgggggtagagtcataatcgtgcatcaggatagggcggtggtgctgcagcagcgcgcgaataaactgctgccgccgccgctccgtcctgcaggaatacaacatggcagtggtctcctcagcgatgattcgcaccgcccgcagcataaggcgccttgtcctccgggcacagcagcgcaccctgatctcacttaaatcagcacagtaactgcagcacagcaccacaatattgttcaaaatcccacagtgcaaggcgctgtatccaaagctcatggcggggaccacagaacccacgtggccatcataccacaagcgcaggtagattaagtggcgacccctcataaacacgctggacataaacattacctcttttggcatgttgtaattcaccacctcccggtaccatataaacctctgattaaacatggcgccatccaccaccatcctaaaccagctggccaaaacctgcccgccggctatacactgcagggaaccgggactggaacaatgacagtggagagcccaggactcgtaaccatggatcatcatgctcgtcatgatgtcaatgttggcacaacacaggcacacgtgcatacacttcctcaggattacaagctcctcccgcgttagaaccatatcccagggaacaacccattcctgaatcagcgtaaatcccacactgcagggaagacctcgcacgtaactcacgttgtgcattgtcaaagtgttacattcgggcagcagcggatgatcctccagtatggtagcgcgggtttctgtctcaaaaggaggtagacgatccctactgtacggagtgcgccgagacaaccgagatcgtgttggtcgtagtgtcatgccaaatggaacgccggacgtagtcattctcgtattttgtatagcaaaacgcggccctggcagaacacactcttcttcgccttctatcctgccgcttagcgtgttccgtgtgatagttcaagtacagccacactcttaagttggtcaaaagaatgctggcttcagttgtaatcaaaactccatcgcatctaattgttctgaggaaatcatccacggtagcatatgcaaatcccaaccaagcaatgcaactggattgcgtttcaagcaggagaggagagggaagagacggaagaaccatgttaatttttattccaaacgatctcgcagtacttcaaattgtagatcgcgcagatggcatctctcgcccccactgtgttggtgaaaaagcacagctaaatcaaaagaaatgcgattttcaaggtgctcaacggtggcttccaacaaagcctccacgcgcacatccaagaacaaaagaataccaaaagaaggagcattttctaactcctcaatcatcatattacattcctgcaccattcccagataattttcagctttccagccttgaattattcgtgtcagttcttgtggtaaatccaatccacacattacaaacaggtcccggagggcgccctccaccaccattcttaaacacaccctcataatgacaaaatatcttgctcctgtgtcacctgtagcgaattgagaatggcaacatcaattgacatgcccttggctctaagttcttctttaagttctagttgtaaaaactctctcatattatcaccaaactgcttagccagaagccccccgggaacaagagcaggggacgctacagtgcagtacaagcgcagacctccccaattggctccagcaaaaacaagattggaataagcatattgggaaccaccagtaatatcatcgaagttgctggaaatataatcaggcagagtttcttgtagaaattgaataaaagaaaaatttgccaaaaaaacattcaaaacctctgggatgcaaatgcaataggttaccgcgctgcgctccaacattgttagttttgaattagtctgcaaaaataaaaaaaaaacaagcgtcatatcatagtagcctgacgaacaggtggataaatcagtctttccatcacaagacaagccacagggtctccagctcgaccctcgtaaaacctgtcatcgtgattaaacaacagcaccgaaagttcctcgcggtgaccagcatgaataagtcttgatgaagcatacaatccagacatgttagcatcagttaaggagaaaaaacagccaacatagcctttgggtataattatgcttaatcgtaagtatagcaaagccacccctcgcggatacaaagtaaaaggcacaggagaataaaaaatataattatttctctgctgctgtttaggcaacgtcgcccccggtccctctaaatacacatacaaagcctcatcagccatggcttaccagagaaagtacagcgggcacacaaaccacaagctctaaagtcactctccaacctctccacaatatatatacacaagccctaaactgacgtaatgggactaaagtgtaaaaaatcccgccaaacccaacacacaccccgaaactgcgtcaccagggaaaagtacagtttcacttccgcaatcccaacaagcgtcacttcctctttctcacggtacgtcacatcccattaacttacaacgtcattttcccacggccgcgccgccccttttaaccgttaaccccacagccaatcaccacacggcccacactttttaaaatcacctcatttacatattggcaccattccatctataaggtatattattgatgatgtt

SEQ ID NO: 173 - DNA, 37825 bp, Artificial Sequence
  Ad35E4PS3/WL-ps3
  misc_feature (2582)..(2735): Ad35 1-->154
  misc_feature (2744)..(2777): loxP
  misc_feature (2784)..(3110): Ad35 155-->481
  misc_feature (3111)..(3144): loxP
  misc_feature (3153)..(27475): Ad35 3112-->27435
  misc_feature (27530)..(29999): lambda-1
  misc_feature (30313)..(30527): BGH polyA
  misc_feature (30552)..(31217): copGFP
  misc_feature (31264)..(31916): CMV
  misc_feature (31968)..(33497): lambda-2
  misc_feature (33558)..(34893): Ad35 30544-->31879
  misc_feature (34889)..(36003): Ad5E4orf6
  misc_feature (36001)..(37823): Ad35 32972-->34794
taaacttggcgcgccctgagtgatttttctctggtcccgccgcatccataccgccagttgtttaccctcacaacgttccagtaaccgggcatgttcatcatcagtaacccgtatcgtgagcatcctctctcgtttcatcggtatcattacccccatgaacagaaatcccccttacacggaggcatcagtgaccaaacaggaaaaaaccgcccttaacatggcccgctttatcagaagccagacattaacgcttctggagaaactcaacgagctggacgcggatgaacaggcagacatctgtgaatcgcttcacgaccacgctgatgagctttaccgcagctgcctcgcgcgtttcggtgatgacggtgaaaacctctgacacatgcagctcccggagacggtcacagcttgtctgtaagcggatgccgggagcagacaagcccgtcagggcgcgtcagcgggtgttggcgggtgtcggggcgcagccatgacccagtcacgtagcgatagcggagtgtatactggcttaactatgcggcatcagagcagattgtactgagagtgcaccatatgcggtgtgaaataccgcacagatgcgtaaggagaaaataccgcatcaggcgctcttccgcttcctcgctcactgactcgctgcgctcggtcgttcggctgcggcgagcggtatcagctcactcaaaggcggtaatacggttatccacagaatcaggggataacgcaggaaagaacatgtgagcaaaaggccagcaaaaggccaggaaccgtaaaaaggccgcgttgctggcgtttttccataggctccgcccccctgacgagcatcacaaaaatcgacgctcaagtcagaggtggcgaaacccgacaggactataaagataccaggcgtttccccctggaagctccctcgtgcgctctcctgttccgaccctgccgcttaccggatacctgtccgcctttctcccttcgggaagcgtggcgctttctcatagctcacgctgtaggtatctcagttcggtgtaggtcgttcgctccaagctgggctgtgtgcacgaaccccccgttcagcccgaccgctgcgccttatccggtaactatcgtcttgagtccaacccggtaagacacgacttatcgccactggcagcagccactggtaacaggattagcagagcgaggtatgtaggcggtgctacagagttcttgaagtggtggcctaactacggctacactagaaggacagtatttggtatctgcgctctgctgaagccagttaccttcggaaaaagagttggtagctcttgatccggcaaacaaaccaccgctggtagcggtggtttttttgtttgcaagcagcagattacgcgcagaaaaaaaggatctcaagaagatcctttgatcttttctacggggtctgacgctcagtggaacgaaaactcacgttaagggattttggtcatgagattatcaaaaaggatcttcacctagatccttttaaattaaaaatgaagttttaaatcaatctaaagtatatatgagtaaacttggtctgacagttaccaatgcttaatcagtgaggcacctatctcagcgatctgtctatttcgttcatccatagttgcctgactccccgtcgtgtagataactacgatacgggagggcttaccatctggccccagtgctgcaatgataccgcgagacccacgctcaccggctccagatttatcagcaataaaccagccagccggaagggccgagcgcagaagtggtcctgcaactttatccgcctccatccagtctattaattgttgccgggaagctagagtaagtagttcgccagttaatagtttgcgcaacgttgttgccattgctgcaggcatcgtggtgtcacgctcgtcgtttggtatggcttcattcagctccggttcccaacgatcaaggcgagttacatgatcccccatgttgtgcaaaaaagcggttagctccttcggtcctccgatcgttgtcagaagtaagttggccgcagtgttatcactcatggttatggcagcactgcataattctcttactgtcatgccatccgtaagatgcttttctgtgactggtgagtactcaaccaagtcattctgagaatagtgtatgcggcgaccgagttgctcttgcccggcgtcaacacgggataataccgcgccacatagcagaactttaaaagtgctcatcattggaaaacgttcttcggggcgaaaactctcaaggatcttaccgctgttgagatccagttcgatgtaacccactcgtgcacccaactgatcttcagcatcttttactttcaccagcgtttctgggtgagcaaaaacaggaaggcaaaatgccgcaaaaaagggaataagggcgacacggaaatgttgaatactcatactcttcctttttcaatattattgaagcatttatcagggttattgtctcatgagcggatacatatttgaatgtatttagaaaaataaacaaataggggttccgcgcacatttccccgaaaagtgccacctgtctagctacgatatcctgtttaaacatcatcaataatataccttatagatggaatggtgccaatatgtaaatgaggtgattttaaaaagtgtgggccgtgtggtgattggctgtggggttaacggttaaaaggggcggcgcggccgtgggaaaatgacgttttatgggggtggagtttatttaaatataacttcgtatagcatacattatacgaagttatggatccttttgcaagttgtcgcgggaaatgttacgcataaaaaggcttcttttctcacggaactacttagttttcccacggtatttaacaggaaatgaggtagttttgaccggatgcaagtgaaaattgctgattttcgcgcgaaaactgaatgaggaagtgtttttctgaataatgtggtatttatggcagggtggagtatttgttcagggccaggtagactttgacccattacgtggaggtttcgattaccgtgttttttacctgaatttccgcgtaccgtgtcaaagtcttctgtttttacgtaggtgtcagctgatcgctagggtatttataacttcgtatagcatacattatacgaagttatatttaaataggaatgtttatgccttaccagtgtaacatgaatcatgtgaaagtgttgttggaaccagatgccttttccagaatgagcctaacaggaatctttgacatgaacacgcaaatctggaagatcctgaggtatgatgatacgagatcgagggtgcgcgcatgcgaatgcggaggcaagcatgccaggttccagccggtgtgtgtagatgtgaccgaagatctcagaccggatcatttggttattgcccgcactggagcagagttcggatccagtggagaagaaactgactaaggtgagtattgggaaaactttggggtgggattttcagatggacagattgagtaaaaatttgttttttctgtcttgcagctgacatgagtggaaatgcttcttttaaggggggagtcttcagcccttatctgacagggcgtctcccatcctgggcaggagttcgtcagaatgttatgggatctactgtggatggaagacccgttcaacccgccaattcttcaacgctgacctatgctactttaagttcttcacctttggacgcagctgcagccgctgccgccgcctctgtcgccgctaacactgtgcttggaatgggttactatggaagcatcgtggctaattccacttcctctaataacccttctacactgactcaggacaagttacttgtccttttggcccagctggaggctttgacccaacgtctgggtgaactttctcagcaggtggccgagttgcgagtacaaactgagtctgctgtcggcacggcaaagtctaaataaaaaaaattccagaatcaatgaataaataaacgagcttgttgttgatttaaaatcaagtgtttttatttcatttttcgcgcacggtatgccctggaccaccgatctcgatcattgagaactcggtggattttttccagaatcctatagaggtgggattgaatgtttagatacatgggcattaggccgtctttggggtggagatagctccattgaagggattcatgctccggggtagtgttgtaaatcacccagtcataacaaggtcgcagtgcatggtgttgcacaatatcttttagaagtaggctgattgccacagataagcccttggtgtaggtgtttacaaaccggttgagctgggaggggtgcattcgaggtgaaattatgtgcattttggattggatttttaagttggcaatattgccgccaagatcccgtcttgggttcatgttatgaaggactaccaagacggtgtatccggtacatttaggaaatttatcgtgcagcttggatggaaaagcgtggaaaaatttggagacacccttgtgtcctccgagattttccatgcactcatccatgataatagcaatggggccgtgggcagcggcgcgggcaaacacgttccgtgggtctgacacatcatagttatgttcctgagttaaatcatcataagccattttaatgaatttggggcggagcgtaccagattggggtatgaatgttccttcgggccccggagcatagttcccctcacagatttgcatttcccaagctttcagttctgagggtggaatcatgtccacctggggggctatgaagaacaccgtttcgggggcgggggtgattagttgggatgatagcaagtttctgagcaattgagatttgccacatccggtggggccataaataattccgattacaggttgcaggtggtagtttagggaacggcaactgccgtcttctcgaagcaagggggccacctcgttcatcatttcccttacatgcatattttcccgcaccaaatccattaggaggcgctctcctcctagtgatagaagttcttgtagtgaggaaaagtttttcagcggttttagaccgtcagccatgggcattttggaaagagtttgctgcaaaagttctagtctgttccacagttcagtgatgtgttctatggcatctcgatccagcagacctcctcgtttcgcgggtttggacggctcctggagtagggtatgagacgatgggcgtccagcgctgccagggttcggtccttccagggtctcagtgttcgagtcagggttgtttccgtcacagtgaaggggtgtgcgcctgcttgggcgcttgccagggtgcgcttcagactcattctgctggtggagaacttctgtcgcttggcgccctgtatgtcggccaagtagcagtttaccatgagttcgtagttgagcgcctcggctgcgtggcctttggcgcggagcttacctttggaagttttcttgcataccgggcagtataggcatttcagcgcatacagcttgggcgcaaggaaaatggattctggggagtatgcatccgcgccgcaggaggcgcaaacagtttcacattccaccagccaggttaaatccggttcattggggtcaaaaacaagttttccgccatattttttgatgcgtttcttacctttggtctccataagttcgtgtcctcgttgagtgacaaacaggctgtccgtatctccgtagactgattttacaggcctcttctccagtggagtgcctcggtcttcttcgtacaggaactctgaccactctgatacaaaggcgcgcgtccaggccagcacaaaggaggctatgtgggaggggtagcgatcgttgtcaaccagggggtccaccttttccaaagtatgcaaacacatgtcaccctcttcaacatccaggaatgtgattggcttgtaggtgtatttcacgtgacctggggtccccgctgggggggtataaaagggggcggttctttgctcttcctcactgtcttccggatcgctgtccaggaacgtcagctgttggggtaggtattccctctcgaaggcgggcatgacctctgcactcaggttgtcagtttctaagaacgaggaggatttgatattgacagtgccggttgagatgcctttcatgaggttttcgtccatttggtcagaaaacacaatttttttattgtcaagtttggtggcaaatgatccatacagggcgttggataaaagtttggcaatggatcgcatggtttggttcttttccttgtccgcgcgctctttggcggcgatgttgagttggacatactcgcgtgccaggcacttccattcggggaagatagttgttaattcatctggcacgattctcacttgccaccctcgattatgcaaggtaattaaatccacactggtggccacctcgcctcgaaggggttcattggtccaacagagcctacctcctttcctagaacagaaagggggaagtgggtctagcataagttcatcgggagggtctgcatccatggtaaagattcccggaagtaaatccttatcaaaatagctgatgggagtggggtcatctaaggccatttgccattctcgagctgccagtgcgcgctcatatgggttaaggggactgccccagggcatgggatgggtgagagcagaggcatacatgccacagatgtcatagacgtagatgggatcctcaaagatgcctatgtaggttggatagcatcgcccccctctgatacttgctcgcacatagtcatatagttcatgtgatggcgctagcagccccggacccaagttggtgcgattgggtttttctgttctgtagacgatctggcgaaagatggcgtgagaattggaagagatggtgggtctttgaaaaatgttgaaatgggcatgaggtagacctacagagtctctgacaaagtgggcataagattcttgaagcttggttaccagttcggcggtgacaagtacgtctagggcgcagtagtcaagtgtttcttgaatgatgtcataacctggttggtttttcttttcccacagttcgcggttgagaaggtattcttcgcgatccttccagtactcttctagcggaaacccgtctttgtctgcacggtaagatcctagcatgtagaactgattaactgccttgtaagggcagcagcccttctctacgggtagagagtatgcttgagcagcttttcgtagcgaagcgtgagtaagggcaaaggtgtctctgaccatgactttgagaaattggtatttgaagtccatgtcgtcacaggctccctgttcccagagttggaagtctacccgtttcttgtaggcggggttgggcaaagcgaaagtaacatcattgaagagaatcttaccggctctgggcataaaattgcgagtgatgcggaaaggctgtggtacttccgctcgattgttgatcacctgggcagctaggacgatttcgtcgaaaccgttgatgttgtgtcctacgatgtataattctatgaaacgcggcgtgcctctgacgtgaggtagcttactgagctcatcaaaggttaggtctgtggggtcagataaggcgtagtgttcgagagcccattcgtgcaggtgaggatttgcatgtaggaatgatgaccaaagatctaccgccagtgctgtttgtaactggtcccgatactgacgaaaatgccggccaattgccattttttctggagtgacacagtagaaggttctggggtcttgttgccatcgatcccacttgagtttaatggctagatcgtgggccatgttgacgagacgctcttctcctgagagtttcatgaccagcatgaaaggaactagttgtttgccaaaggatcccatccaggtgtaagtttccacatcgtaggtcaggaagagtctttctgtgcgaggatgagagccgatcgggaagaactggatttcctgccaccagttggaggattggctgttgatgtgatggaagtagaagtttctgcggcgcgccgagcattcgtgtttgtgcttgtacagacggccgcagtagtcgcagcgttgcacgggttgtatctcgtgaatgagctgtacctggcttcccttgacgagaaatttcagtgggaagccgaggcctggcgattgtatctcgtgctcttctatattcgctgtatcggcctgttcatcttctgtttcgatggtggtcatgctgacgagcccccgcgggaggcaagtccagacctcggcgcgggaggggcggagctgaaggacgagagcgcgcaggctggagctgtccagagtcctgagacgctgcggactcaggttagtaggtagggacagaagattaacttgcatgatcttttccagggcgtgcgggaggttcagatggtacttgatttccacaggttcgtttgtagagacgtcaatggcttgcagggttccgtgtcctttgggcgccactaccgtacctttgttttttcttttgatcggtggtggctctcttgcttcttgcatgctcagaagcggtgacggggacgcgcgccgggcggcagcggttgttccggacccgggggcatggctggtagtggcacgtcggcgccgcgcacgggcaggttctggtattgcgctctgagaagacttgcgtgcgccaccacgcgtcgattgacgtcttgtatctgacgtctctgggtgaaagctaccggccccgtgagcttgaacctgaaagagagttcaacagaatcaatttcggtatcgttaacggcagcttgtctcagtatttcttgtacgtcaccagagttgtcctggtaggcgatctccgccatgaactgctcgatttcttcctcctgaagatctccgcgacccgctctttcgacggtggccgcgaggtcattggagatacggcccatgagttgggagaatgcattcatgcccgcctcgttccagacgcggctgtaaaccacggccccctcggagtctcttgcgcgcatcaccacctgagcgaggttaagctccacgtgtctggttaagaccgcatagttgcataggcgctgaaaaaggtagttgagtgtggtggcaatgtgttcggcgacgaagaaatacatgatccatcgtctcagcggcatttcgctaacatcgcccagagcttccaagcgctccatggcctcgtagaagtccacggcaaaattaaaaaactgggagtttcgcgcggacacggtcaattcctcctcgagaagacggatgagttcggctatggtggcccgtacttcgcgttcgaaggctcccgggatctcttcttcctcttctatctcttcttccactaacatctcttcttcgtcttcaggcgggggcggagggggcacgcggcgacgtcgacggcgcacgggcaaacggtcgatgaatcgttcaatgacctctccgcggcggcggcgcatggtttcagtgacggcgcggccgttctcgcgcggtcgcagagtaaaaacaccgccgcgcatctccttaaagtggtgactgggaggttctccgtttgggagggagagggcgctgattatacattttattaattggcccgtagggactgcgcgcagagatctgatcgtgtcaagatccacgggatctgaaaacctttcgacgaaagcgtctaaccagtcacagtcacaaggtaggctgagtacggcttcttgtgggcgggggtggttatgtgttcggtctgggtcttctgtttcttcttcatctcgggaaggtgagacgatgctgctggtgatgaaattaaagtaggcagttctaagacggcggatggtggcgaggagcaccaggtctttgggtccggcttgctggatacgcaggcgattggccattccccaagcattatcctgacatctagcaagatctttgtagtagtcttgcatgagccgttctacgggcacttcttcctcacccgttctgccatgcatacgtgtgagtccaaatccgcgcattggttgtaccagtgccaagtcagctacgactctttcggcgaggatggcttgctgtacttgggtaagggtggcttgaaagtcatcaaaatccacaaagcggtggtaagcccctgtattaatggtgtaagcacagttggccatgactgaccagttaactgtctggtgaccagggcgcacgagctcggtgtatttaaggcgcgaataggcgcgggtgtcaaagatgtaatcgttgcaggtgcgcaccagatactggtaccctataagaaaatgcggcggtggttggcggtagagaggccatcgttctgtagctggagcgccaggggcgaggtcttccaacataaggcggtgatagccgtagatgtacctggacatccaggtgattcctgcggcggtagtagaagcccgaggaaactcgcgtacgcggttccaaatgttgcgtagcggcatgaagtagttcattgtaggcacggtttgaccagtgaggcgcgcgcagtcattgatgctctatagacacggagaaaatgaaagcgttcagcgactcgactccgtagcctggaggaacgtgaacgggttgggtcgcggtgtaccccggttcgagacttgtactcgagccggccggagccgcggctaacgtggtattggcactcccgtctcgacccagcctacaaaaatccaggatacggaatcgagtcgttttgctggtttccgaatggcagggaagtgagtcctatttttttttttttttgccgctcagaatgcatcccgtgctgcgacagatgcgcccccaacaacagcccccctcgcagcagcagcagcagcaaccacaaaaggctgtccctgcaactactgcaactgccgccgtgagcggtgcgggacagcccgcctatgatctggacttggaagagggcgaaggactggcacgtctaggtgcgccttcgcccgagcggcatccgcgagttcaactgaaaaaagattctcgcgaggcgtatgtgccccaacagaacctatttagagacagaagcggcgaggagccggaggagatgcgagcttcccgctttaacgcgggtcgtgagctgcgtcacggtttggaccgaagacgagtgttgcgagacgaggatttcgaagttgatgaagtgacagggatcagtcctgccagggcacacgtggctgcagccaaccttgtatcggcttacgagcagacagtaaaggaagagcgtaacttccaaaagtcttttaataatcatgtgcgaaccctgattgcccgcgaagaagttacccttggtttgatgcatttgtgggatttgatggaagctatcattcagaaccctactagcaaacctctgaccgcccagctgtttctggtggtgcaacacagcagagacaatgaggctttcagagaggcgctgctgaacatcaccgaacccgaggggagatggttgtatgatcttatcaacattctacagagtatcatagtgcaggagcggagcctgggcctggccgagaaggtagctgccatcaattactcggttttgagcttgggaaaatattacgctcgcaaaatctacaagactccatacgttcccatagacaaggaggtgaagatagatgggttctacatgcgcatgacgctcaaggtcttgaccctgagcgatgatcttggggtgtatcgcaatgacagaatgcatcgcgcggttagcgccagcaggaggcgcgagttaagcgacagggaactgatgcacagtttgcaaagagctctgactggagctggaaccgagggtgagaattacttcgacatgggagctgacttgcagtggcagcctaatcgcagggctctgagcgccgcgacggcaggatgtgagcttccttacatagaagaggcggatgaaggcgaggaggaagagggcgagtacttggaagactgatggcacaacccgtgttttttgctagatggaacagcaagcaccggatcccgcaatgcgggcggcgctgcagagccagccgtccggcattaactcctcggacgattggacccaggccatgcaacgtatcatggcgttgacgactcgcaaccccgaagcctttagacagcaaccccaggccaaccgtctatcggccatcatggaagctgtagtgccttcccgatctaatcccactcatgagaaggtcctggccatcgtgaacgcgttggtggagaacaaagctattcgtccagatgaggccggactggtatacaacgctctcttagaacgcgtggctcgctacaacagtagcaatgtgcaaaccaatttggaccgtatgataacagatgtacgcgaagccgtgtctcagcgcgaaaggttccagcgtgatgccaacctgggttcgctggtggcgttaaatgctttcttgagtactcagcctgctaatgtgccgcgtggtcaacaggattatactaactttttaagtgctttgagactgatggtatcagaagtacctcagagcgaagtgtatcagtccggtcctgattacttctttcagactagcagacagggcttgcagacggtaaatctgagccaagcttttaaaaaccttaaaggtttgtggggagtgcatgccccggtaggagaaagagcaaccgtgtctagcttgttaactccgaactcccgcctgttattactgttggtagctcctttcaccgacagcggtagcatcgaccgtaattcctatttgggttacctactaaacctgtatcgcgaagccatagggcaaagtcaggtggacgagcagacctatcaagaaattacccaagtcagtcgcgctttgggacaggaagacactggcagtttggaagccactctgaacttcttgcttaccaatcggtctcaaaagatccctcctcaatatgctcttactgcggaggaggagaggatccttagatatgtgcagcagagcgtgggattgtttctgatgcaagagggggcaactccgactgcagcactggacatgacagcgcgaaatatggagcccagcatgtatgccagtaaccgacctttcattaacaaactgctggactacttgcacagagctgccgctatgaactctgattatttcaccaatgccatcttaaacccgcactggctgcccccacctggtttctacacgggcgaatatgacatgcccgaccctaatgacggatttctgtgggacgacgtggacagcgatgttttttcacctctttctgatcatcgcacgtggaaaaaggaaggcggtgatagaatgcattcttctgcatcgctgtccggggtcatgggtgctaccgcggctgagcccgagtctgcaagtccttttcctagtctacccttttctctacacagtgtacgtagcagcgaagtgggtagaataagtcgcccgagtttaatgggcgaagaggagtacctaaacgattccttgctcagaccggcaagagaaaaaaatttcccaaacaatggaatagaaagtttggtggataaaatgagtagatggaagacttatgctcaggatcacagagacgagcctgggatcatggggactacaagtagagcgagccgtagacgccagcgccatgacagacagaggggtcttgtgtgggacgatgaggattcggccgatgatagcagcgtgttggacttgggtgggagaggaaggggcaacccgtttgctcatttgcgccctcgcttgggtggtatgttgtgaaaaaaaataaaaaagaaaaactcaccaaggccatggcgacgagcgtacgttcgttcttctttattatctgtgtctagtataatgaggcgagtcgtgctaggcggagcggtggtgtatccggagggtcctcctccttcgtacgagagcgtgatgcagcagcagcaggcgacggcggtgatgcaatccccactggaggctccctttgtgcctccgcgatacctggcacctacggagggcagaaacagcattcgttactcggaactggcacctcagtacgataccaccaggttgtatctggtggacaacaagtcggcggacattgcttctctgaactatcagaatgaccacagcaacttcttgaccacggtggtgcagaacaatgactttacccctacggaagccagcacccagaccattaactttgatgaacgatcgcggtggggcggtcagctaaagaccatcatgcatactaacatgccaaacgtgaacgagtatatgtttagtaacaagttcaaagcgcgtgtgatggtgtccagaaaacctcccgacggtgctgcagttggggatacttatgatcacaagcaggatattttggaatatgagtggttcgagtttactttgccagaaggcaacttttcagttactatgactattgatttgatgaacaatgccatcatagataattacttgaaagtgggtagacagaatggagtgcttgaaagtgacattggtgttaagttcgacaccaggaacttcaagctgggatgggatcccgaaaccaagttgatcatgcctggagtgtatacgtatgaagccttccatcctgacattgtcttactgcctggctgcggagtggattttaccgagagtcgtttgagcaaccttcttggtatcagaaaaaaacagccatttcaagagggttttaagattttgtatgaagatttagaaggtggtaatattccggccctcttggatgtagatgcctatgagaacagtaagaaagaacaaaaagccaaaatagaagctgctacagctgctgcagaagctaaggcaaacatagttgccagcgactctacaagggttgctaacgctggagaggtcagaggagacaattttgcgccaacacctgttccgactgcagaatcattattggccgatgtgtctgaaggaacggacgtgaaactcactattcaacctgtagaaaaagatagtaagaatagaagctataatgtgttggaagacaaaatcaacacagcctatcgcagttggtatctttcgtacaattatggcgatcccgaaaaaggagtgcgttcctggacattgctcaccacctcagatgtcacctgcggagcagagcaggtttactggtcgcttccagacatgatgaaggatcctgtcactttccgctccactagacaagtcagtaactaccctgtggtgggtgcagagcttatgcccgtcttctcaaagagcttctacaacgaacaagctgtgtactcccagcagctccgccagtccacctcgcttacgcacgtcttcaaccgctttcctgagaaccagattttaatccgtccgccggcgcccaccattaccaccgtcagtgaaaacgttcctgctctcacagatcacgggaccctgccgttgcgcagcagtatccggggagtccaacgtgtgaccgttactgacgccagacgccgcacctgtccctacgtgtacaaggcactgggcatagtcgcaccgcgcgtcctttcaagccgcactttctaaaaaaaaaatgtccattcttatctcgcccagtaataacaccggttggggtctgcgcgctccaagcaagatgtacggaggcgcacgcaaacgttctacccaacatcccgtgcgtgttcgcggacattttcgcgctccatggggtgccctcaagggccgcactcgcgttcgaaccaccgtcgatgatgtaatcgatcaggtggttgccgacgcccgtaattatactcctactgcgcctacatctactgtggatgcagttattgacagtgtagtggctgacgctcgcaactatgctcgacgtaagagccggcgaaggcgcattgccagacgccaccgagctaccactgccatgcgagccgcaagagctctgctacgaagagctagacgcgtggggcgaagagccatgcttagggcggccagacgtgcagcttcgggcgccagcgccggcaggtcccgcaggcaagcagccgctgtcgcagcggcgactattgccgacatggcccaatcgcgaagaggcaatgtatactgggtgcgtgacgctgccaccggtcaacgtgtacccgtgcgcacccgtccccctcgcacttagaagatactgagcagtctccgatgttgtgtcccagcggcgaggatgtccaagcgcaaatacaaggaagaaatgctgcaggttatcgcacctgaagtctacggccaaccgttgaaggatgaaaaaaaaccccgcaaaatcaagcgggttaaaaaggacaaaaaagaagaggaagatggcgatgatgggctggcggagtttgtgcgcgagtttgccccacggcgacgcgtgcaatggcgtgggcgcaaagttcgacatgtgttgagacctggaacttcggtggtctttacacccggcgagcgttcaagcgctacttttaagcgttcctatgatgaggtgtacggggatgatgatattcttgagcaggcggctgaccgattaggcgagtttgcttatggcaagcgtagtagaataacttccaaggatgagacagtgtcaatacccttggatcatggaaatcccacccctagtcttaaaccggtcactttgcagcaagtgttacccgtaactccgcgaacaggtgttaaacgcgaaggtgaagatttgtatcccactatgcaactgatggtacccaaacgccagaagttggaggacgttttggagaaagtaaaagtggatccagatattcaacctgaggttaaagtgagacccattaagcaggtagcgcctggtctgggggtacaaactgtagacattaagattcccactgaaagtatggaagtgcaaactgaacccgcaaagcctactgccacctccactgaagtgcaaacggatccatggatgcccatgcctattacaactgacgccgccggtcccactcgaagatcccgacgaaagtacggtccagcaagtctgttgatgcccaattatgttgtacacccatctattattcctactcctggttaccgaggcactcgctactatcgcagccgaaacagtacctcccgccgtcgccgcaagacacctgcaaatcgcagtcgtcgccgtagacgcacaagcaaaccgactcccggcgccctggtgcggcaagtgtaccgcaatggtagtgcggaacctttgacactgccgcgtgcgcgttaccatccgagtatcatcacttaatcaatgttgccgctgcctccttgcagatatggccctcacttgtcgccttcgcgttcccatcactggttaccgaggaagaaactcgcgccgtagaagagggatgttgggacgcggaatgcgacgctacaggcgacggcgtgctatccgcaagcaattgcggggtggttttttaccagccttaattccaattatcgctgctgcaattggcgcgataccaggcatagcttccgtggcggttcaggcctcgcaacgacattgacattggaaaaaaaacgtataaataaaaaaaaatacaatggactctgacactcctggtcctgtgactatgttttcttagagatggaagacatcaatttttcatccttggctccgcgacacggcacgaagccgtacatgggcacctggagcgacatcggcacgagccaactgaacgggggcgccttcaattggagcagtatctggagcgggcttaaaaattttggctcaaccataaaaacatacgggaacaaagcttggaacagcagtacaggacaggcgcttagaaataaacttaaagaccagaacttccaacaaaaagtagtcgatgggatagcttccggcatcaatggagtggtagatttggctaaccaggctgtgcagaaaaagataaacagtcgtttggacccgccgccagcaaccccaggtgaaatgcaagtggaggaagaaattcctccgccagaaaaacgaggcgacaagcgtccgcgtcccgatttggaagagacgctggtgacgcgcgtagatgaaccgccttcttatgaggaagcaacgaagcttggaatgcccaccactagaccgatagccccaatggccaccggggtgatgaaaccttctcagttgcatcgacccgtcaccttggatttgccccctccccctgctgctactgctgtacccgcttctaagcctgtcgctgccccgaaaccagtcgccgtagccaggtcacgtcccgggggcgctcctcgtccaaatgcgcactggcaaaatactctgaacagcatcgtgggtctaggcgtgcaaagtgtaaaacgccgtcgctgcttttaattaaatatggagtagcgcttaacttgcctatctgtgtatatgtgtcattacacgccgtcacagcagcagaggaaaaaaggaagaggtcgtgcgtcgacgctgagttactttcaagatggccaccccatcgatgctgccccaatgggcatacatgcacatcgccggacaggatgcttcggagtacctgagtccgggtctggtgcagttcgcccgcgccacagacacctacttcaatctgggaaataagtttagaaatcccaccgtagcgccgacccacgatgtgaccaccgaccgtagccagcggctcatgttgcgcttcgtgcccgttgaccgggaggacaatacatactcttacaaagtgcggtacaccctggccgtgggcgacaacagagtgctggatatggccagcacgttctttgacattaggggcgtgttggacagaggtcccagtttcaaaccctattctggtacggcttacaactctctggctcctaaaggcgctccaaatgcatctcaatggattgcaaaaggcgtaccaactgcagcagccgcaggcaatggtgaagaagaacatgaaacagaggagaaaactgctacttacacttttgccaatgctcctgtaaaagccgaggctcaaattacaaaagagggcttaccaataggtttggagatttcagctgaaaacgaatctaaacccatctatgcagataaactttatcagccagaacctcaagtgggagatgaaacttggactgacctagacggaaaaaccgaagagtatggaggcagggctctaaagcctactactaacatgaaaccctgttacgggtcctatgcgaagcctactaatttaaaaggtggtcaggcaaaaccgaaaaactcggaaccgtcgagtgaaaaaattgaatatgatattgacatggaattttttgataactcatcgcaaagaacaaacttcagtcctaaaattgtcatgtatgcagaaaatgtaggtttggaaacgccagacactcatgtagtgtacaaacctggaacagaagacacaagttccgaagctaatttgggacaacagtctatgcccaacagacccaactacattggcttcagagataactttattggactcatgtactataacagtactggtaacatgggggtgctggctggtcaagcgtctcagttaaatgcagtggttgacttgcaggacagaaacacagaactttcttaccaactcttgcttgactctctgggcgacagaaccagatactttagcatgtggaatcaggctgtggacagttatgatcctgatgtacgtgttattgaaaatcatggtgtggaagatgaacttcccaactattgttttccactggacggcataggtgttccaacaaccagttacaaatcaatagttccaaatggagaagataataataattggaaagaacctgaagtaaatggaacaagtgagatcggacagggtaatttgtttgccatggaaattaaccttcaagccaatctatggcgaagtttcctttattccaatgtggctctgtatctcccagactcgtacaaatacaccccgtccaatgtcactcttccagaaaacaaaaacacctacgactacatgaacgggcgggtggtgccgccatctctagtagacacctatgtgaacattggtgccaggtggtctctggatgccatggacaatgtcaacccattcaaccaccaccgtaacgctggcttgcgttaccgatctatgcttctgggtaacggacgttatgtgcctttccacatacaagtgcctcaaaaattcttcgctgttaaaaacctgctgcttctcccaggctcctacacttatgagtggaactttaggaaggatgtgaacatggttctacagagttccctcggtaacgacctgcgggtagatggcgccagcatcagtttcacgagcatcaacctctatgctacttttttccccatggctcacaacaccgcttccacccttgaagccatgctgcggaatgacaccaatgatcagtcattcaacgactacctatctgcagctaacatgctctaccccattcctgccaatgcaaccaatattcccatttccattccttctcgcaactgggcggctttcagaggctggtcatttaccagactgaaaaccaaagaaactccctctttggggtctggatttgacccctactttgtctattctggttctattccctacctggatggtaccttctacctgaaccacacttttaagaaggtttccatcatgtttgactcttcagtgagctggcctggaaatgacaggttactatctcctaacgaatttgaaataaagcgcactgtggatggcgaaggctacaacgtagcccaatgcaacatgaccaaagactggttcttggtacagatgctcgccaactacaacatcggctatcagggcttctacattccagaaggatacaaagatcgcatgtattcatttttcagaaacttccagcccatgagcaggcaggtggttgatgaggtcaattacaaagacttcaaggccgtcgccataccctaccaacacaacaactctggctttgtgggttacatggctccgaccatgcgccaaggtcaaccctatcccgctaactatccctatccactcattggaacaactgccgtaaatagtgttacgcagaaaaagttcttgtgtgacagaaccatgtggcgcataccgttctcgagcaacttcatgtctatgggggcccttacagacttgggacagaatatgctctatgccaactcagctcatgctctggacatgacctttgaggtggatcccatggatgagcccaccctgctttatcttctcttcgaagttttcgacgtggtcagagtgcatcagccacaccgcggcatcatcgaggcagtctacctgcgtacaccgttctcggccggtaacgctaccacgtaagaagcttcttgcttcttgcaaatagcagctgcaaccatggcctgcggatcccaaaacggctccagcgagcaagagctcagagccattgtccaagacctgggttgcggaccctattttttgggaacctacgataagcgcttcccggggttcatggcccccgataagctcgcctgtgccattgtaaatacggccggacgtgagacggggggagagcactggttggctttcggttggaacccacgttctaacacctgctacctttttgatccttttggattctcggatgatcgtctcaaacagatttaccagtttgaatatgagggtctcctgcgccgcagcgctcttgctaccaaggaccgctgtattacgctggaaaaatctacccagaccgtgcagggcccccgttctgccgcctgcggacttttctgctgcatgttccttcacgcctttgtgcactggcctgaccgtcccatggacggaaaccccaccatgaaattgctaactggagtgccaaacaacatgcttcattctcctaaagtccagcccaccctgtgtgacaatcaaaaagcactctaccattttcttaatacccattcgccttattttcgctctcatcgtacacacatcgaaagggccactgcgttcgaccgtatggatgttcaataatgactcatgtaaacaacgtgttcaataaacatcactttatttttttacatgtatcaaggctctggattacttatttatttacaagtcgaatgggttctgacgagaatcagaatgacccgcaggcagtgatacgttgcggaactgatacttgggttgccacttgaattcgggaatcaccaacttgggaaccggtatatcgggcaggatgtcactccacagctttctggtcagctgcaaagctccaagcaggtcaggagccgaaatcttgaaatcacaattaggaccagtgctctgagcgcgagagttgcggtacaccggattgcagcactgaaacaccatcagcgacggatgtctcacgcttgccagcacggtgggatctgcaatcatgcccacatccagatcttcagcattggcaatgctgaacggggtcatcttgcaggtctgcctacccatggcgggcacccaattaggcttgtggttgcaatcgcagtgcagggggatcagtatcatcttggcctgatcctgtctgattcctggatacacggctctcatgaaagcatcatattgcttgaaagcctgctgggctttactaccctcgggataaaacatcccgcaggacctgctcgaaaactggttagcctgcacagccggcatcattcacacagcagcgggcgtcattgttggctatttgcaccacacttctgccccagcggttttgggtgattttggttcgctcgggattctcctttaaggctcgttgtccgttctcgctggccacatccatctcgataatctgctccttctgaatcataatattgccatgcaggcacttcagcttgccctcataatcattgcagccatgaggccacaacgcacagcctgtacattcccaattatggtgggcgatctgagaaaaagaatgtatcattccctgcagaaatcttcccatcatcgtgctcagtgtcttgtgactagtgaaagttaactggatgcctcggtgctcttcgtttacgtactggtgacagatgcgcttgtattgttcgtgttgctcaggcattagtttaaaacaggttctaagttcgttatccagcctgtacttctccatcagcagacacatcacttccatgcctttctcccaagcagacaccaggggcaagctaatcggattcttaacagtgcaggcagcagctcctttagccagagggtcatctttagcgatcttctcaatgcttcttttgccatccttctcaacgatgcgcacgggcgggtagctgaaacccactgctacaagttgcgcctcttctctttcttcttcgctgtcttgactgatgtcttgcatggggatatgtttggtcttccttggcttctttttggggggtatcggaggaggaggactgtcgctccgttccggagacagggaggattgtgacgtttcgctcaccattaccaactgactgtcggtagaagaacctgaccccacacggcgacaggtgtttttcttcgggggcagaggtggaggcgattgcgaagggctgcggtccgacctggaaggcggatgactggcagaaccccttccgcgttcgggggtgtgctccctgtggcggtcgcttaactgatttccttcgcggctggccattgtgttctcctaggcagagaaacaacagacatggaaactcagccattgctgtcaacatcgccacgagtgccatcacatctcgtcctcagcgacgaggaaaaggagcagagcttaagcattccaccgcccagtcctgccaccacctctaccctagaagataaggaggtcgacgcatctcatgacatgcagaataaaaaagcgaaagagtctgagacagacatcgagcaagacccgggctatgtgacaccggtggaacacgaggaagagttgaaacgctttctagagagagaggatgaaaactgcccaaaacagcgagcagataactatcaccaagatgctggaaatagggatcagaacaccgactacctcatagggcttgacggggaagacgcgctccttaaacatctagcaagacagtcgctcatagtcaaggatgcattattggacagaactgaagtgcccatcagtgtggaagagctcagctgcgcctacgagcttaaccttttttcacctcgtactccccccaaacgtcagccaaacggcacctgcgagccaaatcctcgcttaaacttttatccagcttttgctgtgccagaagtactggctacctatcacatcttttttaaaaatcaaaaaattccagtctcctgccgcgctaatcgcacccgcgccgatgccctactcaatctgggacctggttcacgcttacctgatatagcttccttggaagaggttccaaagatcttcgagggtctgggcaataatgagactcgggccgcaaatgctctgcaaaagggagaaaatggcatggatgagcatcacagcgttctggtggaattggaaggcgataatgccagactcgcagtactcaagcgaagcgtcgaggtcacacacttcgcatatcccgctgtcaacctgccccctaaagtcatgacggcggtcatggaccagttactcattaagcgcgcaagtcccctttcagaagacatgcatgacccagatgcctgtgatgagggtaaaccagtggtcagtgatgagcagctaacccgatggctgggcaccgactctccccgggatttggaagagcgtcgcaagcttatgatggccgtggtgctggttaccgtagaactagagtgtctccgacgtttctttaccgattcagaaaccttgcgcaaactcgaagagaatctgcactacacttttagacacggctttgtgcggcaggcatgcaagatatctaacgtggaactcaccaacctggtttcctacatgggtattctgcatgagaatcgcctaggacaaagcgtgctgcacagcacccttaagggggaagcccgccgtgattacatccgcgattgtgtctatctctacctgtgccacacgtggcaaaccggcatgggtgtatggcagcaatgtttagaagaacagaacttgaaagagcttgacaagctcttacagaaatctcttaaggttctgtggacagggttcgacgagcgcaccgtcgcttccgacctggcagacctcatcttcccagagcgtctcagggttactttgcgaaacggattgcctgactttatgagccagagcatgcttaacaattttcgctctttcatcctggaacgctccggtatcctgcccgccacctgctgcgcactgccctccgactttgtgcctctcacctaccgcgagtgccccccgccgctatggagtcactgctacctgttccgtctggccaactatctctcctaccactcggatgtgatcgaggatgtgagcggagacggcttgctggagtgccactgccgctgcaatctgtgcacgccccaccggtccctagcttgcaacccccagttgatgagcgaaacccagataataggcacctttgaattgcaaggccccagcagccaaggcgatgggtcttctcctgggcaaagtttaaaactgaccccgggactgtggacctccgcctacttgcgcaagtttgctccggaagattaccacccctatgaaatcaagttctatgaggaccaatcacagcctccaaaggccgaactttcggcttgcgtcatcacccagggggcaattctggcccaattgcaagccatccaaaaatcccgccaagaatttctactgaaaaagggtaagggggtctaccttgacccccagaccggcgaggaactcaacacaaggttccctcaggatgtcccaacgacgagaaaacaagaagttgaaggtgcagccgccgcccccagaagatatggaggaagattgggacagtcaggcagaggaggcggaggaggacagtctggaggacagtctggaggaagacagtttggaggaggaaaacgaggaggcagaggaggtggaagaagtaaccgccgacaaacagttatcctcggctgcggagacaagcaacagcgctaccatctccgctccgagtcgaggaacccggcggcgtcccagcagtagatgggacgagaccggacgcttcccgaacccaaccagcgcttccaagaccggtaagaaggatcggcagggatacaagtcctggcgggggcataagaatgccatcatctcctgcttgcatgagtgcgggggcaacatatccttcacgcggcgctacttgctattccaccatggggtgaactttccgcgcaatgttttgcattactaccgtcacctccacagcccctactatagccagcaaatcccgacagtctcgacagataaagacagcggcggcgacctccaacagaaaaccagcagcggcagttagaaaatacacaacaagtgcagcaacaggaggattaaagattacagccaacgagccagcgcaaacccgagagttaagaaatcggatctttccaaccctgtatgccatcttccagcagagtcggggtcaagagcaggaactgaaaataaaaaaccgatctctgcgttcgctcaccagaagttgtttgtatcacaagagcgaagatcaacttcagcgcactctcgaggacgccgaggctctcttcaacaagtactgcgcgctgactcttaaagagtaggcagcgaccgcgcttattcaaaaaaggcgggaattacatcatcctcgacatgagtaaagaaattcccacgccttacatgtggagttatcaaccccaaatgggattggcagcaggcgcctcccaggactactccacccgcatgaattggctcagcgccgggccttctatgatttctcgagttaatgatatacgcgcctaccgaaaccaaatacttttggaacagtcagctcttaccaccacgccccgccaacaccttaatcccagaaattggcccgccgccctagtgtaccaggaaagtcccgctcccaccactgtattacttcctcgagacgcccaggccgaagtccaaatgactaatgcaggtgcgcagttagctggcggctccaccctatgtcgtcacaggcctcggcataatataaaacgcctgatgatcagaggccgaggtatccagctcaacgacgagtcggtgagctctccgcttggtctacgaccagacggaatctttcagattgccggctgcgggagatcttccttcacccctcgtcaggctgttctgactttggaaagttcgtcttcgcaaccccgctcgggcggaatcgggaccgttcaatttgtagaggagtttactccctctgtctacttcaaccccttctccggatctcctgggcactacccggacgagttcataccgaacttcgacgcgattagcgagtcagtggacggctacgattgatgtctggtgacgcggctgagctatctcggctgcgacatctagaccactgccgccgctttcgctgctttgcccgggaacttattgagttcatctacttcgaactccccaaggatcaccctcaaggtccggcccacggagtgcggattactatcgaaggcaaaatagactctcgcctgcaacgaattttctcccagcggcccgtgctgatcgagcgagaccagggaaacaccacggttagtaatcaattacggggtcattagttcatagcccatatatggagttgcgatcgctgcgggccatgtcatacaccgccttcagagcagccggacctatctgcccgttcgtgccgtcgttgttaatcaccacatggttattctgctcaaacgtcccggacgcctgcgaccggctgtctgccatgctgcccggtgtaccgacataaccgccggtggcatagccgcgcatcagccggtaaagattccccacgccaatccggctggttgcctccttcgtgaagacaaactcaccacggtgaacaatccccgctggctcatatttgccgccggttcccgtaaatcctccggttgcaaaatggaatttcgccgcagcggcctgaatggctgtaccgcctgacgcggatgcgccgccaccaacagccccgccaatggcgctgccgatactcccgacaatccccaccattgcctgcttaagcagaatttctgtcatcatggacagcacggaacgggtgaagctgcgccagttctgctcactgccggtcagcatcgccgccatattctgtgcaataccatcaaaggtctgcgtggctgcactttttacctgcgacatactgtccgtggcgctctcttcccactcactccagccggacttcaggcctgccatccagttcccgcgaagctggtcttcagccgcccaggtctttttctgctctgacatgacgttattcagcgccagcggattatcgccatactgttccttcaggcgctgttccgtggcttcccgttctgcctgccggtcagtcagcccccggcttttcgcatcaatggcggcccgttttgcccgttgctgctgtgcgaatttatccgcctgctgcgccagcgcgttcaggcgctcctgatacgtaaccttgtcgccaagtgcagccagctggcgtttgtactccagcgtctcatctttatgcgccagcagggatttctcctgtgcagacagctggcgacgttgcgccgcctcctccagtaccgcgaactgactctccgccttccacaaatcccggcgctgctggctgattttctcatttgctccggcatgcttctccagcgtccggagttctgcctgaagcgtcagcagggcagcatgagcactgtcttcctgacgatcgcccgcagacaccttcacgctggactgtttcggctttttcagcgtcgcttcataatcctttttcgccgccgccatcagcgtgttgtaatccgcctgcaggattttcccgtctttcagtgccttgttcagttcttcctgacgggcggtatatttctccagcggcgtctgcagccgttcgtaagccttctgcgcctcttcggtatatttcagccgtgacgcttcggtatcgctctgctgctgcgcatttttgtcctgttgagtctgctgctcagccttctttcgggcggcttcaagcgcaagacgggccttttcacgatcatcccagtaacgcgcccgcgcttcatcgttaacaaaataatcatccttgcgcagattccagatgtcgtctgctttcttatacgcagcctctgccttaatcagcatctcctgcgcggtatcaggacgaccaatatccagcaccgcatcccacatggatttgaatgcccgcgcagtcctgtctgcccaggtctccagcgtgcccatgttctctttcaggcggcgggtctggtcatcaaaccctttcgttgcggcctcgttcgccgcctgcaatgccccggcttcatcgccggaacgctgcaactgagcaacatacgcaatctgctccgccgacacgttatggaactggcgagccatcgccgtcagccccgacgtcgggtctgtggtcagcttcccgaaggcttcagcgaccttgtccacctccacgccggatgcagaggagaaacgcgccacactctggctgatggacgcaatctgagcctcaccgcttacccccgccttaaccagtgcgctgagtgactcgctggtctggttaaacgtcagccctgccgcctgcccggctctggacaggaccagcatacgatctgccgtcagtcccgcctgattgccggaaaggaccagcgttttgttgaaatcggacagggttgagttgccctgataccaggcatacgccagcgcaccggtcgccaccgccagcgaggtggcccccaccatcggcagggtgatcgcaccggcaagccccctgaacatggggatcatcccgccgaaggagtccttcacctgccccccctgttgcagcaggatcagccacggactttgcccgcctgcaagctgcgtggccacgtcggtgaactgtgcaggcagcatacgcatggcggctttatactgcccgacggaaatccccgctttctgtgcagccagcgcctgtcggctcagcgactgttcaacgactgccgctgtttttttcgcatcactttccgtaccagaaaaatgacgcctgactctggccatctgctcgtcaaatctggccgcatccagactcaaatcaacgacgtcgactaagctctagcatttgtgaaccatcaccctaatcaagttttttggggtcgaggtgccgtaaagcactaaatcggaaccctaaagggagcccccgatttagagcttgacggggaaagccggcgaacgtggcgagaaaggaagggaagaaagcgaaaggagcgggcgctagggcgctggcaagtgtagcggtcacgctgcgcgtaaccaccacacccgccgcgcttaatgcgccgctacagggcgcgtggggataccccctagagccccagctggttctttccgcctcagaagccatagagcccaccgcatccccagcatgcctgctattgtcttcccaatcctcccccttgctgtcctgccccaccccaccccccagaatagaatgacacctactcagacaatgcgatgcaatttcctcattttattaggaaaggacagtgggagtggcaccttccagggtcaaggaaggcacgggggaggggcaaacaacagatggctggcaactagaaggcacagtcgaggctgatcagcgggtttgctagcttaggcgaaggcgatgggggtcttgaaggcgtgctggtactccacgatgcccagctcggtgttgctgtgcagctcctccacgcggcggaaggcgaacatggggcccccgttctgcaggatgctggggtggatggcgctcttgaagtgcatgtggctgtccaccacgaagctgtagtagccgccgtcgcgcaggctgaaggtgcgggcgaagctgcccaccagcacgttatcgcccatggggtgcaggtgctccacggtggcgttgctgcggatgatcttgtcggtgaagatcacgctgtcctcggggaagccggtgcccaccaccttgaagtcgccgatcacgcggccggcctcgtagcggtagctgaagctcacgtgcagcacgccgccgtcctcgtacttctcgatgcgggtgttggtgtagccgccgttgttgatggcgtgcaggaaggggttctcgtagccgctggggtaggtgccgaagtggtagaagccgtagcccatcacgtggctcagcaggtaggggctgaaggtcagggcgcctttggtgctcttcatcttgttggtcatgcggccctgctcgggggtgccctctccgccgcccaccagctcgaactccacgccgttcagggtgccggtgatgcggcactcgatcttcatggcgggcatggtggctagcctagccagcttgggtctccctatagtgagtcgtattaatttcgataagccagtaagcagtgggttctctagttagccagagagctctgcttatatagacctcccaccgtacacgcctaccgcccatttgcgtcaatggggcggagttgttacgacattttggaaagtcccgttgattttggtgccaaaacaaactcccattgacgtcaatggggtggagacttggaaatccccgtgagtcaaaccgctatccacgcccattgatgtactgccaaaaccgcatcaccatggtaatagcgatgactaatacgtagatgtactgccaagtaggaaagtcccataaggtcatgtactgggcataatgccaggcgggccatttaccgtcattgacgtcaatagggggcgtacttggcatatgatacacttgatgtactgccaagtgggcagtttaccgtaaatactccacccattgacgtcaatggaaagtccctattggcgttactatgggaacatacgtcattattgacgtcaatgggcgggggtcgttgggcggtcagccaggcgggccatttaccgtaagttatgtaacgcggaactccatatatgggctatgaactaatgaccccgtaattgattactattaataactacaataatcaatgtcaacgcgtatatctggcccgtacatcgcgaagcagcgcaaaacgcctaaccctaagcagattcttcatgcaattaagcttcgcggtgcttcttcagtacgctacggcaaatgtcatcgacgtttttatccggaaactgctgtctggctttttttgatttcagaattagcctgacgggcaatgctgcgaagggcgttttcctgctgaggtgtcattgaacaagtcccatgtcggcaagcataagcacacagaatatgaagcccgctgccagaaaaatgcattccgtggttgtcatacctggtttctctcatctgcttctgctttcgccaccatcatttccagcttttgtgaaagggatgcggctaacgtatgaaattcttcgtctgtttctactggtattggcacaaacctgattccaatttgagcaaggctatgtgccatctcgatactcgttcttaactcaacagaagatgctttgtgcatacagcccctcgtttattatttatctcctcagccagccgctgtgctttcagtggatttcggataacagaaaggccgggaaatacccagcctcgctttgtaacggagtagacgaaagtgattgcgcctacccggatattatcgtgaggatgcgtcatcgccattgctccccaaatacaaaaccaatttcagccagtgcctcgtccattttttcgatgaactccggcacgatctcgtcaaaactcgccatgtacttttcatcccgctcaatcacgacataatgcaggccttcacgcttcatacgcgggtcatagttggcaaagtaccaggcattttttcgcgtcacccacatgctgtactgcacctgggccatgtaagctgactttatggcctcgaaaccaccgagccggaacttcatgaaatcccgggaggtaaacgggcatttcagttcaaggccgttgccgtcactgcataaaccatcgggagagcaggcggtacgcatactttcgtcgcgatagatgatcggggattcagtaacattcacgccggaagtgaattcaaacagggttctggcgtcgttctcgtactgttttccccaggccagtgctttagcgttaacttccggagccacaccggtgcaaacctcagcaagcagggtgtggaagtaggacattttcatgtcaggccacttctttccggagcggggttttgctatcacgttgtgaacttctgaagcggtgatgacgccgagccgtaatttgtgccacgcatcatccccctgttcgacagctctcacatcgatcccggtacgctgcaggataatgtccggtgtcatgctgccaccttctgctctgcggctttctgtttcaggaatccaagagcttttactgcttcggcctgtgtcagttctgacgatgcacgaatgtcgcggcgaaatatctgggaacagagcggcaataagtcgtcatcccatgttttatccagggcgatcagcagagtgttaatctcctgcatggtttcatcgttaaccggagtgatgtcgcgttccggctgacgttctgcagtgtatgcagtattttcgacaatgcgctcggcttcatccttgtcatagataccagcaaatccgaagcggccgcggaacaacaacaattgcattcattttatgtttcaggttcagggggaggtgtggtcctgcgattccatcgagtgcacctacaccctgctgaagaccctatgcggcctaagagacctgctaccaatgaattaaaaaaaaatgattaataaaaaatcacttacttgaaatcagcaataaggtctctgttgaaattttctcccagcagcacctcacttccctcttcccaactctggtattctaaaccccgttcagcggcatactttctccatactttaaaggggatgtcaaattttagctcctctcctgtacccacaatcttcatgtctttcttcccagatgaccaagagagtccggctcagtgactccttcaaccctgtctacccctatgaagatgaaagcacctcccaacaccccttttataacccagggtttatttccccaaatggcttcacacaaagcccagacggagttcttactttaaaatgtttaaccccactaacaaccacaggcggatctctacagctaaaagtgggagggggacttacagtggatgacactgatggtaccttacaagaaaacatacgtgctacagcacccattactaaaaataatcactctgtagaactatccattggaaatggattagaaactcaaaacaataaactatgtgccaaattgggaaatgggttaaaatttaacaacggtgacatttgtataaaggatagtattaacaccttatggactggaataaaccctccacctaactgtcaaattgtggaaaacactaatacaaatgatggcaaacttactttagtattagtaaaaaatggagggcttgttaatggctacgtgtctctagttggtgtatcagacactgtgaaccaaatgttcacacaaaagacagcaaacatccaattaagattatattttgactcttctggaaatctattaactgaggaatcagacttaaaaattccacttaaaaataaatcttctacagcgaccagtgaaactgtagccagcagcaaagcctttatgccaagtactacagcttatcccttcaacaccactactagggatagtgaaaactacattcatggaatatgttactacatgactagttatgatagaagtctatttcccttgaacatttctataatgctaaacagccgtatgatttcttccaatgttgcctatgccatacaatttgaatggaatctaaatgcaagtgaatctccagaaagcaacatagctacgctgaccacatccccctttttcttttcttacattacagaagacgacaactaaaataaagtttaagtgtttttatttaaaatcacaaaattcgagtagttattttgcctccaccttcccatttgacagaatacacagtcctttctccccggctggccttaaaaagcatcatatcatgggtaacagacatattcttaggtgttatattccacacggtttcctgtcgagccaaacgctcatcagtgatattaataaactccccgggcagctcacttaagttcatgtcgctgtccagctgctgagccacaggctgctgtccaacttgcggttgcttaacgggcggcgaaggagaagtccacgcctacatgggggtagagtcataatcgtgcatcaggatagggcggtggtgctgcagcagcgcgcgaataaactgctgccgccgccgctccgtcctgcaggaatacaacatggcagtggtctcctcagcgatgattcgcaccgcccgcagcataaggcgccttgtcctccgggcacagcagcgcaccctgatctcacttaaatcagcacagtaactgcagcacagcaccacaatattgttcaaaatcccacagtgcaaggcgctgtatccaaagctcatggcggggaccacagaacccacgtggccatcataccacaagcgcaggtagattaagtggcgacccctcataaacacgctggacataaacattacctcttttggcatgttgtaattcaccacctcccggtaccatataaacctctgattaaacatggcgccatccaccaccatcctaaaccagctggccaaaacctgcccgccggctatacactgcagggaaccgggactggaacaatgacagtggagagcccaggactcgtaaccatggatcatcatgctcgtcatgatgtcaatgttggcacaacacaggcacacgtgcatacacttcctcaggattacaagctcctcccgcgttagaaccatatcccagggaacaacccattcctgaatcagcgtaaatcccacactgcagggaagacctcgcacgtaactcacgttgtgcattgtcaaagtgttacattcgggcagcagcggatgatcctccagtatggtagcgcgggtttctgtctcaaaaggaggtagacgatccctactgtacggagtgcgccgagacaaccgagatcgtgttggtcgtagtgtcatgccaaatggaacgccggacgtagtcattctcgtattttgtatagcaaaacgcggccctggcagaacacactcttcttcgccttctatcctgccgcttagcgtgttccgtgtgatagttcaagtacagccacactcttaagttggtcaaaagaatgctggcttcagttgtaatcaaaactccatcgcatctaattgttctgaggaaatcatccacggtagcatatgcaaatcccaaccaagcaatgcaactggattgcgtttcaagcaggagaggagagggaagagacggaagaaccatgttaatttttattccaaacgatctcgcagtacttcaaattgtagatcgcgcagatggcatctctcgcccccactgtgttggtgaaaaagcacagctaaatcaaaagaaatgcgattttcaaggtgctcaacggtggcttccaacaaagcctccacgcgcacatccaagaacaaaagaataccaaaagaaggagcattttctaactcctcaatcatcatattacattcctgcaccattcccagataattttcagctttccagccttgaattattcgtgtcagttcttgtggtaaatccaatccacacattacaaacaggtcccggagggcgccctccaccaccattcttaaacacaccctcataatgacaaaatatcttgctcctgtgtcacctgtagcgaattgagaatggcaacatcaattgacatgcccttggctctaagttcttctttaagttctagttgtaaaaactctctcatattatcaccaaactgcttagccagaagccccccgggaacaagagcaggggacgctacagtgcagtacaagcgcagacctccccaattggctccagcaaaaacaagattggaataagcatattgggaaccaccagtaatatcatcgaagttgctggaaatataatcaggcagagtttcttgtagaaattgaataaaagaaaaatttgccaaaaaaacattcaaaacctctgggatgcaaatgcaataggttaccgcgctgcgctccaacattgttagttttgaattagtctgcaaaaataaaaaaaaaacaagcgtcatatcatagtagcctgacgaacaggtggataaatcagtctttccatcacaagacaagccacagggtctccagctcgaccctcgtaaaacctgtcatcgtgattaaacaacagcaccgaaagttcctcgcggtgaccagcatgaataagtcttgatgaagcatacaatccagacatgttagcatcagttaaggagaaaaaacagccaacatagcctttgggtataattatgcttaatcgtaagtatagcaaagccacccctcgcggatacaaagtaaaaggcacaggagaataaaaaatataattatttctctgctgctgtttaggcaacgtcgcccccggtccctctaaatacacatacaaagcctcatcagccatggcttaccagagaaagtacagcgggcacacaaaccacaagctctaaagtcactctccaacctctccacaatatatatacacaagccctaaactgacgtaatgggactaaagtgtaaaaaatcccgccaaacccaacacacaccccgaaactgcgtcaccagggaaaagtacagtttcacttccgcaatcccaacaagcgtcacttcctctttctcacggtacgtcacatcccattaacttacaacgtcattttcccacggccgcgccgccccttttaaccgttaaccccacagccaatcaccacacggcccacactttttaaaatcacctcatttacatattggcaccattccatctataaggtatattattgatgatgtt

SEQ ID NO: 174 - DNA, 36264 bp, Artificial Sequence
  pAd35GFP-5E4-CCDb
catcatcaataatataccttatagatggaatggtgccaatatgtaaatgaggtgattttaaaaagtgtgggccgtgtggtgattggctgtggggttaacggttaaaaggggcggcgcggccgtgggaaaatgacgttttatgggggtggagtttttttgcaagttgtcgcgggaaatgttacgcataaaaaggcttcttttctcacggaactacttagttttcccacggtatttaacaggaaatgaggtagttttgaccggatgcaagtgaaaattgctgattttcgcgcgaaaactgaatgaggaagtgtttttctgaataatgtggtatttatggcagggtggagtatttgttcagggccaggtagactttgacccattacgtggaggtttcgattaccgtgttttttacctgaatttccgcgtaccgtgtcaaagtcttctgtttttacgtaggtgtcagctgatcgctagggtatttgttcaaaaaaaagcccgctcattaggcgggctgggttatattccccagaacatcaggttaatggcgtttttgatgtcattttcgcggtggctgagatcagccacttcttccccgataacggagaccggcacactggccatatcggtggtcatcatgcgccagctttcatccccgatatgcaccaccgggtaaagttcacgggagactttatctgacagcagacgtgcactggccagggggatcaccatccgtcgcccgggcgtgtcaataatatcactctgtacatccacaaacagacgataacggctctctcttttataggtgtaaaccttaaactgcataatctgacctcctggttatgtgtgggagggctaaccatggatccatggttaccaatgcttaatcagtgaggcacctatctcagcgatctgtctatttcgttcatccatagttgcctgactccccgtcgtgtagataactacgatacgggagggcttaccatctggccccagtgctgcaatgataccgcgagacccacgctcaccggctccagatttatcagcaataaaccagccagccggaagggccgagcgcagaagtggtcctgcaactttatccgcctccatccagtctattaattgttgccgggaagctagagtaagtagttcgccagttaatagtttgcgcaacgttgttgccattgctgcaggcatcgtggtgtcacgctcgtcgtttggtatggcttcattcagctccggttcccaacgatcaaggcgagttacatgatcccccatgttgtgcaaaaaagcggttagctccttcggtcctccgatcgttgtcagaagtaagttggccgcagtgttatcactcatggttatggcagcactgcataattctcttactgtcatgccatccgtaagatgcttttctgtgactggtgagtactcaaccaagtcattctgagaatagtgtatgcggcgaccgagttgctcttgcccggcgtcaacacgggataataccgcgccacatagcagaactttaaaagtgctcatcattggaaaacgttcttcggggcgaaaactctcaaggatcttaccgctgttgagatccagttcgatgtaacccactcgtgcacccaactgatcttcagcatcttttactttcaccagcgtttctgggtgagcaaaaacaggaaggcaaaatgccgcaaaaaagggaataagggcgacacggaaatgttgaatactcatactcttcctttttcaatattattgaagcatttatcagggttattgtctcatgagcggatacatatttgaatgtatttagaaaaataaacaaagctaccttaagagagtgtcaggaatgtttatgccttaccagtgtaacatgaatcatgtgaaagtgttgttggaaccagatgccttttccagaatgagcctaacaggaatctttgacatgaacacgcaaatctggaagatcctgaggtatgatgatacgagatcgagggtgcgcgcatgcgaatgcggaggcaagcatgccaggttccagccggtgtgtgtagatgtgaccgaagatctcagaccggatcatttggttattgcccgcactggagcagagttcggatccagtggagaagaaactgactaaggtgagtattgggaaaactttggggtgggattttcagatggacagattgagtaaaaatttgttttttctgtcttgcagctgacatgagtggaaatgcttcttttaaggggggagtcttcagcccttatctgacagggcgtctcccatcctgggcaggagttcgtcagaatgttatgggatctactgtggatggaagacccgttcaacccgccaattcttcaacgctgacctatgctactttaagttcttcacctttggacgcagctgcagccgctgccgccgcctctgtcgccgctaacactgtgcttggaatgggttactatggaagcatcgtggctaattccacttcctctaataacccttctacactgactcaggacaagttacttgtccttttggcccagctggaggctttgacccaacgtctgggtgaactttctcagcaggtggccgagttgcgagtacaaactgagtctgctgtcggcacggcaaagtctaaataaaaaaaattccagaatcaatgaataaataaacgagcttgttgttgatttaaaatcaagtgtttttatttcatttttcgcgcacggtatgccctggaccaccgatctcgatcattgagaactcggtggattttttccagaatcctatagaggtgggattgaatgtttagatacatgggcattaggccgtctttggggtggagatagctccattgaagggattcatgctccggggtagtgttgtaaatcacccagtcataacaaggtcgcagtgcatggtgttgcacaatatcttttagaagtaggctgattgccacagataagcccttggtgtaggtgtttacaaaccggttgagctgggaggggtgcattcgaggtgaaattatgtgcattttggattggatttttaagttggcaatattgccgccaagatcccgtcttgggttcatgttatgaaggactaccaagacggtgtatccggtacatttaggaaatttatcgtgcagcttggatggaaaagcgtggaaaaatttggagacacccttgtgtcctccgagattttccatgcactcatccatgataatagcaatggggccgtgggcagcggcgcgggcaaacacgttccgtgggtctgacacatcatagttatgttcctgagttaaatcatcataagccattttaatgaatttggggcggagcgtaccagattggggtatgaatgttccttcgggccccggagcatagttcccctcacagatttgcatttcccaagctttcagttctgagggtggaatcatgtccacctggggggctatgaagaacaccgtttcgggggcgggggtgattagttgggatgatagcaagtttctgagcaattgagatttgccacatccggtggggccataaataattccgattacaggttgcaggtggtagtttagggaacggcaactgccgtcttctcgaagcaagggggccacctcgttcatcatttcccttacatgcatattttcccgcaccaaatccattaggaggcgctctcctcctagtgatagaagttcttgtagtgaggaaaagtttttcagcggttttagaccgtcagccatgggcattttggaaagagtttgctgcaaaagttctagtctgttccacagttcagtgatgtgttctatggcatctcgatccagcagacctcctcgtttcgcgggtttggacggctcctggagtagggtatgagacgatgggcgtccagcgctgccagggttcggtccttccagggtctcagtgttcgagtcagggttgtttccgtcacagtgaaggggtgtgcgcctgcttgggcgcttgccagggtgcgcttcagactcattctgctggtggagaacttctgtcgcttggcgccctgtatgtcggccaagtagcagtttaccatgagttcgtagttgagcgcctcggctgcgtggcctttggcgcggagcttacctttggaagttttcttgcataccgggcagtataggcatttcagcgcatacagcttgggcgcaaggaaaatggattctggggagtatgcatccgcgccgcaggaggcgcaaacagtttcacattccaccagccaggttaaatccggttcattggggtcaaaaacaagttttccgccatattttttgatgcgtttcttacctttggtctccataagttcgtgtcctcgttgagtgacaaacaggctgtccgtatctccgtagactgattttacaggcctcttctccagtggagtgcctcggtcttcttcgtacaggaactctgaccactctgatacaaaggcgcgcgtccaggccagcacaaaggaggctatgtgggaggggtagcgatcgttgtcaaccagggggtccaccttttccaaagtatgcaaacacatgtcaccctcttcaacatccaggaatgtgattggcttgtaggtgtatttcacgtgacctggggtccccgctgggggggtataaaagggggcggttctttgctcttcctcactgtcttccggatcgctgtccaggaacgtcagctgttggggtaggtattccctctcgaaggcgggcatgacctctgcactcaggttgtcagtttctaagaacgaggaggatttgatattgacagtgccggttgagatgcctttcatgaggttttcgtccatttggtcagaaaacacaatttttttattgtcaagtttggtggcaaatgatccatacagggcgttggataaaagtttggcaatggatcgcatggtttggttcttttccttgtccgcgcgctctttggcggcgatgttgagttggacatactcgcgtgccaggcacttccattcggggaagatagttgttaattcatctggcacgattctcacttgccaccctcgattatgcaaggtaattaaatccacactggtggccacctcgcctcgaaggggttcattggtccaacagagcctacctcctttcctagaacagaaagggggaagtgggtctagcataagttcatcgggagggtctgcatccatggtaaagattcccggaagtaaatccttatcaaaatagctgatgggagtggggtcatctaaggccatttgccattctcgagctgccagtgcgcgctcatatgggttaaggggactgccccagggcatgggatgggtgagagcagaggcatacatgccacagatgtcatagacgtagatgggatcctcaaagatgcctatgtaggttggatagcatcgcccccctctgatacttgctcgcacatagtcatatagttcatgtgatggcgctagcagccccggacccaagttggtgcgattgggtttttctgttctgtagacgatctggcgaaagatggcgtgagaattggaagagatggtgggtctttgaaaaatgttgaaatgggcatgaggtagacctacagagtctctgacaaagtgggcataagattcttgaagcttggttaccagttcggcggtgacaagtacgtctagggcgcagtagtcaagtgtttcttgaatgatgtcataacctggttggtttttcttttcccacagttcgcggttgagaaggtattcttcgcgatccttccagtactcttctagcggaaacccgtctttgtctgcacggtaagatcctagcatgtagaactgattaactgccttgtaagggcagcagcccttctctacgggtagagagtatgcttgagcagcttttcgtagcgaagcgtgagtaagggcaaaggtgtctctgaccatgactttgagaaattggtatttgaagtccatgtcgtcacaggctccctgttcccagagttggaagtctacccgtttcttgtaggcggggttgggcaaagcgaaagtaacatcattgaagagaatcttaccggctctgggcataaaattgcgagtgatgcggaaaggctgtggtacttccgctcgattgttgatcacctgggcagctaggacgatttcgtcgaaaccgttgatgttgtgtcctacgatgtataattctatgaaacgcggcgtgcctctgacgtgaggtagcttactgagctcatcaaaggttaggtctgtggggtcagataaggcgtagtgttcgagagcccattcgtgcaggtgaggatttgcatgtaggaatgatgaccaaagatctaccgccagtgctgtttgtaactggtcccgatactgacgaaaatgccggccaattgccattttttctggagtgacacagtagaaggttctggggtcttgttgccatcgatcccacttgagtttaatggctagatcgtgggccatgttgacgagacgctcttctcctgagagtttcatgaccagcatgaaaggaactagttgtttgccaaaggatcccatccaggtgtaagtttccacatcgtaggtcaggaagagtctttctgtgcgaggatgagagccgatcgggaagaactggatttcctgccaccagttggaggattggctgttgatgtgatggaagtagaagtttctgcggcgcgccgagcattcgtgtttgtgcttgtacagacggccgcagtagtcgcagcgttgcacgggttgtatctcgtgaatgagctgtacctggcttcccttgacgagaaatttcagtgggaagccgaggcctggcgattgtatctcgtgctcttctatattcgctgtatcggcctgttcatcttctgtttcgatggtggtcatgctgacgagcccccgcgggaggcaagtccagacctcggcgcgggaggggcggagctgaaggacgagagcgcgcaggctggagctgtccagagtcctgagacgctgcggactcaggttagtaggtagggacagaagattaacttgcatgatcttttccagggcgtgcgggaggttcagatggtacttgatttccacaggttcgtttgtagagacgtcaatggcttgcagggttccgtgtcctttgggcgccactaccgtacctttgttttttcttttgatcggtggtggctctcttgcttcttgcatgctcagaagcggtgacggggacgcgcgccgggcggcagcggttgttccggacccgggggcatggctggtagtggcacgtcggcgccgcgcacgggcaggttctggtattgcgctctgagaagacttgcgtgcgccaccacgcgtcgattgacgtcttgtatctgacgtctctgggtgaaagctaccggccccgtgagcttgaacctgaaagagagttcaacagaatcaatttcggtatcgttaacggcagcttgtctcagtatttcttgtacgtcaccagagttgtcctggtaggcgatctccgccatgaactgctcgatttcttcctcctgaagatctccgcgacccgctctttcgacggtggccgcgaggtcattggagatacggcccatgagttgggagaatgcattcatgcccgcctcgttccagacgcggctgtaaaccacggccccctcggagtctcttgcgcgcatcaccacctgagcgaggttaagctccacgtgtctggtgaagaccgcatagttgcataggcgctgaaaaaggtagttgagtgtggtggcaatgtgttcggcgacgaagaaatacatgatccatcgtctcagcggcatttcgctaacatcgcccagagcttccaagcgctccatggcctcgtagaagtccacggcaaaattaaaaaactgggagtttcgcgcggacacggtcaattcctcctcgagaagacggatgagttcggctatggtggcccgtacttcgcgttcgaaggctcccgggatctcttcttcctcttctatctcttcttccactaacatctcttcttcgtcttcaggcgggggcggagggggcacgcggcgacgtcgacggcgcacgggcaaacggtcgatgaatcgttcaatgacctctccgcggcggcggcgcatggtttcagtgacggcgcggccgttctcgcgcggtcgcagagtaaaaacaccgccgcgcatctccttaaagtggtgactgggaggttctccgtttgggagggagagggcgctgattatacattttattaattggcccgtagggactgcgcgcagagatctgatcgtgtcaagatccacgggatctgaaaacctttcgacgaaagcgtctaaccagtcacagtcacaaggtaggctgagtacggcttcttgtgggcgggggtggttatgtgttcggtctgggtcttctgtttcttcttcatctcgggaaggtgagacgatgctgctggtgatgaaattaaagtaggcagttctaagacggcggatggtggcgaggagcaccaggtctttgggtccggcttgctggatacgcaggcgattggccattccccaagcattatcctgacatctagcaagatctttgtagtagtcttgcatgagccgttctacgggcacttcttcctcacccgttctgccatgcatacgtgtgagtccaaatccgcgcattggttgtaccagtgccaagtcagctacgactctttcggcgaggatggcttgctgtacttgggtaagggtggcttgaaagtcatcaaaatccacaaagcggtggtaagcccctgtattaatggtgtaagcacagttggccatgactgaccagttaactgtctggtgaccagggcgcacgagctcggtgtatttaaggcgcgaataggcgcgggtgtcaaagatgtaatcgttgcaggtgcgcaccagatactggtaccctataagaaaatgcggcggtggttggcggtagagaggccatcgttctgtagctggagcgccaggggcgaggtcttccaacataaggcggtgatagccgtagatgtacctggacatccaggtgattcctgcggcggtagtagaagcccgaggaaactcgcgtacgcggttccaaatgttgcgtagcggcatgaagtagttcattgtaggcacggtttgaccagtgaggcgcgcgcagtcattgatgctctatagacacggagaaaatgaaagcgttcagcgactcgactccgtagcctggaggaacgtgaacgggttgggtcgcggtgtaccccggttcgagacttgtactcgagccggccggagccgcggctaacgtggtattggcactcccgtctcgacccagcctacaaaaatccaggatacggaatcgagtcgttttgctggtttccgaatggcagggaagtgagtcctattttttttttttttgccgctcagatgcatcccgtgctgcgacagatgcgcccccaacaacagcccccctcgcagcagcagcagcagcaaccacaaaaggctgtccctgcaactactgcaactgccgccgtgagcggtgcgggacagcccgcctatgatctggacttggaagagggcgaaggactggcacgtctaggtgcgccttcgcccgagcggcatccgcgagttcaactgaaaaaagattctcgcgaggcgtatgtgccccaacagaacctatttagagacagaagcggcgaggagccggaggagatgcgagcttcccgctttaacgcgggtcgtgagctgcgtcacggtttggaccgaagacgagtgttgcgagacgaggatttcgaagttgatgaagtgacagggatcagtcctgccagggcacacgtggctgcagccaaccttgtatcggcttacgagcagacagtaaaggaagagcgtaacttccaaaagtcttttaataatcatgtgcgaaccctgattgcccgcgaagaagttacccttggtttgatgcatttgtgggatttgatggaagctatcattcagaaccctactagcaaacctctgaccgcccagctgtttctggtggtgcaacacagcagagacaatgaggctttcagagaggcgctgctgaacatcaccgaacccgaggggagatggttgtatgatcttatcaacattctacagagtatcatagtgcaggagcggagcctgggcctggccgagaaggtagctgccatcaattactcggttttgagcttgggaaaatattacgctcgcaaaatctacaagactccatacgttcccatagacaaggaggtgaagatagatgggttctacatgcgcatgacgctcaaggtcttgaccctgagcgatgatcttggggtgtatcgcaatgacagaatgcatcgcgcggttagcgccagcaggaggcgcgagttaagcgacagggaactgatgcacagtttgcaaagagctctgactggagctggaaccgagggtgagaattacttcgacatgggagctgacttgcagtggcagcctagtcgcagggctctgagcgccgcgacggcaggatgtgagcttccttacatagaagaggcggatgaaggcgaggaggaagagggcgagtacttggaagactgatggcacaacccgtgttttttgctagatggaacagcaagcaccggatcccgcaatgcgggcggcgctgcagagccagccgtccggcattaactcctcggacgattggacccaggccatgcaacgtatcatggcgttgacgactcgcaaccccgaagcctttagacagcaaccccaggccaaccgtctatcggccatcatggaagctgtagtgccttcccgatctaatcccactcatgagaaggtcctggccatcgtgaacgcgttggtggagaacaaagctattcgtccagatgaggccggactggtatacaacgctctcttagaacgcgtggctcgctacaacagtagcaatgtgcaaaccaatttggaccgtatgataacagatgtacgcgaagccgtgtctcagcgcgaaaggttccagcgtgatgccaacctgggttcgctggtggcgttaaatgctttcttgagtactcagcctgctaatgtgccgcgtggtcaacaggattatactaactttttaagtgctttgagactgatggtatcagaagtacctcagagcgaagtgtatcagtccggtcctgattacttctttcagactagcagacagggcttgcagacggtaaatctgagccaagcttttaaaaaccttaaaggtttgtggggagtgcatgccccggtaggagaaagagcaaccgtgtctagcttgttaactccgaactcccgcctgttattactgttggtagctcctttcaccgacagcggtagcatcgaccgtaattcctatttgggttacctactaaacctgtatcgcgaagccatagggcaaagtcaggtggacgagcagacctatcaagaaattacccaagtcagtcgcgctttgggacaggaagacactggcagtttggaagccactctgaacttcttgcttaccaatcggtctcaaaagatccctcctcaatatgctcttactgcggaggaggagaggatccttagatatgtgcagcagagcgtgggattgtttctgatgcaagagggggcaactccgactgcagcactggacatgacagcgcgaaatatggagcccagcatgtatgccagtaaccgacctttcattaacaaactgctggactacttgcacagagctgccgctatgaactctgattatttcaccaatgccatcttaaacccgcactggctgcccccacctggtttctacacgggcgaatatgacatgcccgaccctaatgacggatttctgtgggacgacgtggacagcgatgttttttcacctctttctgatcatcgcacgtggaaaaaggaaggcggtgatagaatgcattcttctgcatcgctgtccggggtcatgggtgctaccgcggctgagcccgagtctgcaagtccttttcctagtctacccttttctctacacagtgtacgtagcagcgaagtgggtagaataagtcgcccgagtttaatgggcgaagaggagtacctaaacgattccttgctcagaccggcaagagaaaaaaatttcccaaacaatggaatagaaagtttggtggataaaatgagtagatggaagacttatgctcaggatcacagagacgagcctgggatcatggggactacaagtagagcgagccgtagacgccagcgccatgacagacagaggggtcttgtgtgggacgatgaggattcggccgatgatagcagcgtgttggacttgggtgggagaggaaggggcaacccgtttgctcatttgcgccctcgcttgggtggtatgttgtgaaaaaaaataaaaaagaaaaactcaccaaggccatggcgacgagcgtacgttcgttcttctttattatctgtgtctagtataatgaggcgagtcgtgctaggcggagcggtggtgtatccggagggtcctcctccttcgtacgagagcgtgatgcagcagcagcaggcgacggcggtgatgcaatccccactggaggctccctttgtgcctccgcgatacctggcacctacggagggcagaaacagcattcgttactcggaactggcacctcagtacgataccaccaggttgtatctggtggacaacaagtcggcggacattgcttctctgaactatcagaatgaccacagcaacttcttgaccacggtggtgcagaacaatgactttacccctacggaagccagcacccagaccattaactttgatgaacgatcgcggtggggcggtcagctaaagaccatcatgcatactaacatgccaaacgtgaacgagtatatgtttagtaacaagttcaaagcgcgtgtgatggtgtccagaaaacctcccgacggtgctgcagttggggatacttatgatcacaagcaggatattttggaatatgagtggttcgagtttactttgccagaaggcaacttttcagttactatgactattgatttgatgaacaatgccatcatagataattacttgaaagtgggtagacagaatggagtgcttgaaagtgacattggtgttaagttcgacaccaggaacttcaagctgggatgggatcccgaaaccaagttgatcatgcctggagtgtatacgtatgaagccttccatcctgacattgtcttactgcctggctgcggagtggattttaccgagagtcgtttgagcaaccttcttggtatcagaaaaaaacagccatttcaagagggttttaagattttgtatgaagatttagaaggtggtaatattccggccctcttggatgtagatgcctatgagaacagtaagaaagaacaaaaagccaaaatagaagctgctacagctgctgcagaagctaaggcaaacatagttgccagcgactctacaagggttgctaacgctggagaggtcagaggagacaattttgcgccaacacctgttccgactgcagaatcattattggccgatgtgtctgaaggaacggacgtgaaactcactattcaacctgtagaaaaagatagtaagaatagaagctataatgtgttggaagacaaaatcaacacagcctatcgcagttggtatctttcgtacaattatggcgatcccgaaaaaggagtgcgttcctggacattgctcaccacctcagatgtcacctgcggagcagagcaggtttactggtcgcttccagacatgatgaaggatcctgtcactttccgctccactagacaagtcagtaactaccctgtggtgggtgcagagcttatgcccgtcttctcaaagagcttctacaacgaacaagctgtgtactcccagcagctccgccagtccacctcgcttacgcacgtcttcaaccgctttcctgagaaccagattttaatccgtccgccggcgcccaccattaccaccgtcagtgaaaacgttcctgctctcacagatcacgggaccctgccgttgcgcagcagtatccggggagtccaacgtgtgaccgttactgacgccagacgccgcacctgtccctacgtgtacaaggcactgggcatagtcgcaccgcgcgtcctttcaagccgcactttctaaaaaaaaaatgtccattcttatctcgcccagtaataacaccggttggggtctgcgcgctccaagcaagatgtacggaggcgcacgcaaacgttctacccaacatcccgtgcgtgttcgcggacattttcgcgctccatggggtgccctcaagggccgcactcgcgttcgaaccaccgtcgatgatgtaatcgatcaggtggttgccgacgcccgtaattatactcctactgcgcctacatctactgtggatgcagttattgacagtgtagtggctgacgctcgcaactatgctcgacgtaagagccggcgaaggcgcattgccagacgccaccgagctaccactgccatgcgagccgcaagagctctgctacgaagagctagacgcgtggggcgaagagccatgcttagggcggccagacgtgcagcttcgggcgccagcgccggcaggtcccgcaggcaagcagccgctgtcgcagcggcgactattgccgacatggcccaatcgcgaagaggcaatgtatactgggtgcgtgacgctgccaccggtcaacgtgtacccgtgcgcacccgtccccctcgcacttagaagatactgagcagtctccgatgttgtgtcccagcggcgaggatgtccaagcgcaaatacaaggaagaaatgctgcaggttatcgcacctgaagtctacggccaaccgttgaaggatgaaaaaaaaccccgcaaaatcaagcgggttaaaaaggacaaaaaagaagaggaagatggcgatgatgggctggcggagtttgtgcgcgagtttgccccacggcgacgcgtgcaatggcgtgggcgcaaagttcgacatgtgttgagacctggaacttcggtggtctttacacccggcgagcgttcaagcgctacttttaagcgttcctatgatgaggtgtacggggatgatgatattcttgagcaggcggctgaccgattaggcgagtttgcttatggcaagcgtagtagaataacttccaaggatgagacagtgtcaatacccttggatcatggaaatcccacccctagtcttaaaccggtcactttgcagcaagtgttacccgtaactccgcgaacaggtgttaaacgcgaaggtgaagatttgtatcccactatgcaactgatggtacccaaacgccagaagttggaggacgttttggagaaagtaaaagtggatccagatattcaacctgaggttaaagtgagacccattaagcaggtagcgcctggtctgggggtacaaactgtagacattaagattcccactgaaagtatggaagtgcaaactgaacccgcaaagcctactgccacctccactgaagtgcaaacggatccatggatgcccatgcctattacaactgacgccgccggtcccactcgaagatcccgacgaaagtacggtccagcaagtctgttgatgcccaattatgttgtacacccatctattattcctactcctggttaccgaggcactcgctactatcgcagccgaaacagtacctcccgccgtcgccgcaagacacctgcaaatcgcagtcgtcgccgtagacgcacaagcaaaccgactcccggcgccctggtgcggcaagtgtaccgcaatggtagtgcggaacctttgacactgccgcgtgcgcgttaccatccgagtatcatcacttaatcaatgttgccgctgcctccttgcagatatggccctcacttgtcgccttcgcgttcccatcactggttaccgaggaagaaactcgcgccgtagaagagggatgttgggacgcggaatgcgacgctacaggcgacggcgtgctatccgcaagcaattgcggggtggttttttaccagccttaattccaattatcgctgctgcaattggcgcgataccaggcatagcttccgtggcggttcaggcctcgcaacgacattgacattggaaaaaaaacgtataaataaaaaaaaatacaatggactctgacactcctggtcctgtgactatgttttcttagagatggaagacatcaatttttcatccttggctccgcgacacggcacgaagccgtacatgggcacctggagcgacatcggcacgagccaactgaacgggggcgccttcaattggagcagtatctggagcgggcttaaaaattttggctcaaccataaaaacatacgggaacaaagcttggaacagcagtacaggacaggcgcttagaaataaacttaaagaccagaacttccaacaaaaagtagtcgatgggatagcttccggcatcaatggagtggtagatttggctaaccaggctgtgcagaaaaagataaacagtcgtttggacccgccgccagcaaccccaggtgaaatgcaagtggaggaagaaattcctccgccagaaaaacgaggcgacaagcgtccgcgtcccgatttggaagagacgctggtgacgcgcgtagatgaaccgccttcttatgaggaagcaacgaagcttggaatgcccaccactagaccgatagccccaatggccaccggggtgatgaaaccttctcagttgcatcgacccgtcaccttggatttgccccctccccctgctgctactgctgtacccgcttctaagcctgtcgctgccccgaaaccagtcgccgtagccaggtcacgtcccgggggcgctcctcgtccaaatgcgcactggcaaaatactctgaacagcatcgtgggtctaggcgtgcaaagtgtaaaacgccgtcgctgcttttaattaaatatggagtagcgcttaacttgcctatctgtgtatatgtgtcattacacgccgtcacagcagcagaggaaaaaaggaagaggtcgtgcgtcgacgctgagttactttcaagatggccaccccatcgatgctgccccaatgggcatacatgcacatcgccggacaggatgcttcggagtacctgagtccgggtctggtgcagttcgcccgcgccacagacacctacttcaatctgggaaataagtttagaaatcccaccgtagcgccgacccacgatgtgaccaccgaccgtagccagcggctcatgttgcgcttcgtgcccgttgaccgggaggacaatacatactcttacaaagtgcggtacaccctggccgtgggcgacaacagagtgctggatatggccagcacgttctttgacattaggggcgtgttggacagaggtcccagtttcaaaccctattctggtacggcttacaactctctggctcctaaaggcgctccaaatgcatctcaatggattgcaaaaggcgtaccaactgcagcagccgcaggcaatggtgaagaagaacatgaaacagaggagaaaactgctacttacacttttgccaatgctcctgtaaaagccgaggctcaaattacaaaagagggcttaccaataggtttggagatttcagctgaaaacgaatctaaacccatctatgcagataaactttatcagccagaacctcaagtgggagatgaaacttggactgacctagacggaaaaaccgaagagtatggaggcagggctctaaagcctactactaacatgaaaccctgttacgggtcctatgcgaagcctactaatttaaaaggtggtcaggcaaaaccgaaaaactcggaaccgtcgagtgaaaaaattgaatatgatattgacatggaattttttgataactcatcgcaaagaacaaacttcagtcctaaaattgtcatgtatgcagaaaatgtaggtttggaaacgccagacactcatgtagtgtacaaacctggaacagaagacacaagttccgaagctaatttgggacaacagtctatgcccaacagacccaactacattggcttcagagataactttattggactcatgtactataacagtactggtaacatgggggtgctggctggtcaagcgtctcagttaaatgcagtggttgacttgcaggacagaaacacagaactttcttaccaactcttgcttgactctctgggcgacagaaccagatactttagcatgtggaatcaggctgtggacagttatgatcctgatgtacgtgttattgaaaatcatggtgtggaagatgaacttcccaactattgttttccactggacggcataggtgttccaacaaccagttacaaatcaatagttccaaatggagaagataataataattggaaagaacctgaagtaaatggaacaagtgagatcggacagggtaatttgtttgccatggaaattaaccttcaagccaatctatggcgaagtttcctttattccaatgtggctctgtatctcccagactcgtacaaatacaccccgtccaatgtcactcttccagaaaacaaaaacacctacgactacatgaacgggcgggtggtgccgccatctctagtagacacctatgtgaacattggtgccaggtggtctctggatgccatggacaatgtcaacccattcaaccaccaccgtaacgctggcttgcgttaccgatctatgcttctgggtaacggacgttatgtgcctttccacatacaagtgcctcaaaaattcttcgctgttaaaaacctgctgcttctcccaggctcctacacttatgagtggaactttaggaaggatgtgaacatggttctacagagttccctcggtaacgacctgcgggtagatggcgccagcatcagtttcacgagcatcaacctctatgctacttttttccccatggctcacaacaccgcttccacccttgaagccatgctgcggaatgacaccaatgatcagtcattcaacgactacctatctgcagctaacatgctctaccccattcctgccaatgcaaccaatattcccatttccattccttctcgcaactgggcggctttcagaggctggtcatttaccagactgaaaaccaaagaaactccctctttggggtctggatttgacccctactttgtctattctggttctattccctacctggatggtaccttctacctgaaccacacttttaagaaggtttccatcatgtttgactcttcagtgagctggcctggaaatgacaggttactatctcctaacgaatttgaaataaagcgcactgtggatggcgaaggctacaacgtagcccaatgcaacatgaccaaagactggttcttggtacagatgctcgccaactacaacatcggctatcagggcttctacattccagaaggatacaaagatcgcatgtattcatttttcagaaacttccagcccatgagcaggcaggtggttgatgaggtcaattacaaagacttcaaggccgtcgccataccctaccaacacaacaactctggctttgtgggttacatggctccgaccatgcgccaaggtcaaccctatcccgctaactatccctatccactcattggaacaactgccgtaaatagtgttacgcagaaaaagttcttgtgtgacagaaccatgtggcgcataccgttctcgagcaacttcatgtctatgggggcccttacagacttgggacagaatatgctctatgccaactcagctcatgctctggacatgacctttgaggtggatcccatggatgagcccaccctgctttatcttctcttcgaagttttcgacgtggtcagagtgcatcagccacaccgcggcatcatcgaggcagtctacctgcgtacaccgttctcggccggtaacgctaccacgtaagaagcttcttgcttcttgcaaatagcagctgcaaccatggcctgcggatcccaaaacggctccagcgagcaagagctcagagccattgtccaagacctgggttgcggaccctattttttgggaacctacgataagcgcttcccggggttcatggcccccgataagctcgcctgtgccattgtaaatacggccggacgtgagacggggggagagcactggttggctttcggttggaacccacgttctaacacctgctacctttttgatccttttggattctcggatgatcgtctcaaacagatttaccagtttgaatatgagggtctcctgcgccgcagcgctcttgctaccaaggaccgctgtattacgctggaaaaatctacccagaccgtgcagggcccccgttctgccgcctgcggacttttctgctgcatgttccttcacgcctttgtgcactggcctgaccgtcccatggacggaaaccccaccatgaaattgctaactggagtgccaaacaacatgcttcattctcctaaagtccagcccaccctgtgtgacaatcaaaaagcactctaccattttcttaatacccattcgccttattttcgctctcatcgtacacacatcgaaagggccactgcgttcgaccgtatggatgttcaataatgactcatgtaaacaacgtgttcaataaacatcactttatttttttacatgtatcaaggctctggattacttatttatttacaagtcgaatgggttctgacgagaatcagaatgacccgcaggcagtgatacgttgcggaactgatacttgggttgccacttgaattcgggaatcaccaacttgggaaccggtatatcgggcaggatgtcactccacagctttctggtcagctgcaaagctccaagcaggtcaggagccgaaatcttgaaatcacaattaggaccagtgctctgagcgcgagagttgcggtacaccggattgcagcactgaaacaccatcagcgacggatgtctcacgcttgccagcacggtgggatctgcaatcatgcccacatccagatcttcagcattggcaatgctgaacggggtcatcttgcaggtctgcctacccatggcgggcacccaattaggcttgtggttgcaatcgcagtgcagggggatcagtatcatcttggcctgatcctgtctgattcctggatacacggctctcatgaaagcatcatattgcttgaaagcctgctgggctttactaccctcggtataaaacatcccgcaggacctgctcgaaaactggttagctgcacagccggcatcattcacacagcagcgggcgtcattgttggctatttgcaccacacttctgccccagcggttttgggtgattttggttcgctcgggattctcctttaaggctcgttgtccgttctcgctggccacatccatctcgataatctgctccttctgaatcataatattgccatgcaggcacttcagcttgccctcataatcattgcagccatgaggccacaacgcacagcctgtacattcccaattatggtgggcgatctgagaaaaagaatgtatcattccctgcagaaatcttcccatcatcgtgctcagtgtcttgtgactagtgaaagttaactggatgcctcggtgctcttcgtttacgtactggtgacagatgcgcttgtattgttcgtgttgctcaggcattagtttaaaacaggttctaagttcgttatccagcctgtacttctccatcagcagacacatcacttccatgcctttctcccaagcagacaccaggggcaagctaatcggattcttaacagtgcaggcagcagctcctttagccagagggtcatctttagcgatcttctcaatgcttcttttgccatccttctcaacgatgcgcacgggcgggtagctgaaacccactgctacaagttgcgcctcttctctttcttcttcgctgtcttgactgatgtcttgcatggggatatgtttggtcttccttggcttctttttggggggtatcggaggaggaggactgtcgctccgttccggagacagggaggattgtgacgtttcgctcaccattaccaactgactgtcggtagaagaacctgaccccacacggcgacaggtgtttttcttcgggggcagaggtggaggcgattgcgaagggctgcggtccgacctggaaggcggatgactggcagaaccccttccgcgttcgggggtgtgctccctgtggcggtcgcttaactgatttccttcgcggctggccattgtgttctcctaggcagagaaacaacagacatggaaactcagccattgctgtcaacatcgccacgagtgccatcacatctcgtcctcagcgacgaggaaaaggagcagagcttaagcattccaccgcccagtcctgccaccacctctaccctagaagataaggaggtcgacgcatctcatgacatgcagaataaaaaagcgaaagagtctgagacagacatcgagcaagacccgggctatgtgacaccggtggaacacgaggaagagttgaaacgctttctagagagagaggatgaaaactgcccaaaacagcgagcagataactatcaccaagatgctggaaatagggatcagaacaccgactacctcatagggcttgacggggaagacgcgctccttaaacatctagcaagacagtcgctcatagtcaaggatgcattattggacagaactgaagtgcccatcagtgtggaagagctcagctgcgcctacgagcttaaccttttttcacctcgtactccccccaaacgtcagccaaacggcacctgcgagccaaatcctcgcttaaacttttatccagcttttgctgtgccagaagtactggctacctatcacatcttttttaaaaatcaaaaaattccagtctcctgccgcgctaatcgcacccgcgccgatgccctactcaatctgggacctggttcacgcttacctgatatagcttccttggaagaggttccaaagatcttcgagggtctgggcaataatgagactcgggccgcaaatgctctgcaaaagggagaaaatggcatggatgagcatcacagcgttctggtggaattggaaggcgataatgccagactcgcagtactcaagcgaagcgtcgaggtcacacacttcgcatatcccgctgtcaacctgccccctaaagtcatgacggcggtcatggaccagttactcattaagcgcgcaagtcccctttcagaagacatgcatgacccagatgcctgtgatgagggtaaaccagtggtcagtgatgagcagctaacccgatggctgggcaccgactctccccgggatttggaagagcgtcgcaagcttatgatggccgtggtgctggttaccgtagaactagagtgtctccgacgtttctttaccgattcagaaaccttgcgcaaactcgaagagaatctgcactacacttttagacacggctttgtgcggcaggcatgcaagatatctaacgtggaactcaccaacctggtttcctacatgggtattctgcatgagaatcgcctaggacaaagcgtgctgcacagcacccttaagggggaagcccgccgtgattacatccgcgattgtgtctatctctacctgtgccacacgtggcaaaccggcatgggtgtatggcagcaatgtttagaagaacagaacttgaaagagcttgacaagctcttacagaaatctcttaaggttctgtggacagggttcgacgagcgcaccgtcgcttccgacctggcagacctcatcttcccagagcgtctcagggttactttgcgaaacggattgcctgactttatgagccagagcatgcttaacaattttcgctctttcatcctggaacgctccggtatcctgcccgccacctgctgcgcactgccctccgactttgtgcctctcacctaccgcgagtgccccccgccgctatggagtcactgctacctgttccgtctggccaactatctctcctaccactcggatgtgatcgaggatgtgagcggagacggcttgctggagtgccactgccgctgcaatctgtgcacgccccaccggtccctagcttgcaacccccagttgatgagcgaaacccagataataggcacctttgaattgcaaggccccagcagccaaggcgatgggtcttctcctgggcaaagtttaaaactgaccccgggactgtggacctccgcctacttgcgcaagtttgctccggaagattaccacccctatgaaatcaagttctatgaggaccaatcacagcctccaaaggccgaactttcggcttgcgtcatcacccagggggcaattctggcccaattgcaagccatccaaaaatcccgccaagaatttctactgaaaaagggtaagggggtctaccttgacccccagaccggcgaggaactcaacacaaggttccctcaggatgtcccaacgacgagaaaacaagaagttgaaggtgcagccgccgcccccagaagatatggaggaagattgggacagtcaggcagaggaggcggaggaggacagtctggaggacagtctggaggaagacagtttggaggaggaaaacgaggaggcagaggaggtggaagaagtaaccgccgacaaacagttatcctcggctgcggagacaagcaacagcgctaccatctccgctccgagtcgaggaacccggcggcgtcccagcagtagatgggacgagaccggacgcttcccgaacccaaccagcgcttccaagaccggtaagaaggatcggcagggatacaagtcctggcgggggcataagaatgccatcatctcctgcttgcatgagtgcgggggcaacatatccttcacgcggcgctacttgctattccaccatggggtgaactttccgcgcaatgttttgcattactaccgtcacctccacagcccctactatagccagcaaatcccgacagtctcgacagataaagacagcggcggcgacctccaacagaaaaccagcagcggcagttagaaaatacacaacaagtgcagcaacaggaggattaaagattacagccaacgagccagcgcaaacccgagagttaagaaatcggatctttccaaccctgtatgccatcttccagcagagtcggggtcaagagcaggaactgaaaataaaaaaccgatctctgcgttcgctcaccagaagttgtttgtatcacaagagcgaagatcaacttcagcgcactctcgaggacgccgaggctctcttcaacaagtactgcgcgctgactcttaaagagtaggcagcgaccgcgcttattcaaaaaaggcgggaattacatcatcctcgacatgagtaaagaaattcccacgccttacatgtggagttatcaaccccaaatgggattggcagcaggcgcctcccaggactactccacccgcatgaattggctcagcgccgggccttctatgatttctcgagttaatgatatacgcgcctaccgaaaccaaatacttttggaacagtcagctcttaccaccacgccccgccaacaccttaatcccagaaattggcccgccgccctagtgtaccaggaaagtcccgctcccaccactgtattacttcctcgagacgcccaggccgaagtccaaatgactaatgcaggtgcgcagttagctggcggctccaccctatgtcgtcacaggcctcggcataatataaaacgcctgatgatcagaggccgaggtatccagctcaacgacgagtcggtgagctctccgcttggtctacgaccagacggaatctttcagattgccggctgcgggagatcttccttcacccctcgtcaggctgttctgactttggaaagttcgtcttcgcaaccccgctcgggcggaatcgggaccgttcaatttgtagaggagtttactccctctgtctacttcaaccccttctccggatctcctgggcactacccggacgagttcataccgaacttcgacgcgattagcgagtcagtggacggctacgattgatgtctggtgacgcggctgagctatctcggctgcgacatctagaccactgccgccgctttcgctgctttgcccgggaacttattgagttcatctacttcgaactccccaaggatcaccctcaaggtccggcccacggagtgcggattactatcgaaggcaaaatagactctcgcctgcaacgaattttctcccagcggcccgtgctgatcgagcgagaccagggaaacaccacggttagtaatcaattacggggtcattagttcatagcccatatatggagttaacttgtttattgcagcttataatggttacaaataaagcaatagcatcacaaatttcacaaataaagcatttttttcactgcattctagttgtggtttgtccaaactcatcaatgtatcttatcatgtctgctcgaagcggccggccgccccgactctagagtcgcggcctcattaggaagttcctatactttctagagaataggaacttctcagaagaactcgtcaagaaggcgatagaaggcgatgcgctgcgaatcgggagcggcgataccgtaaagcacgaggaagcggtcagcccattcgccgccaagctcttcagcaatatcacgggtagccaacgctatgtcctgatagcggtccgccacacccagccggccacagtcgatgaatccagaaaagcggccattttccaccatgatattcggcaagcaggcatcgccatgggtcacgacgagatcctcgccgtcgggcatgcgcgccttgagcctggcgaacagttcggctggcgcgagcccctgatgctcttcgtccagatcatcctgatcgacaagaccggcttccatccgagtacgtgctcgctcgatgcgatgtttcgcttggtggtcgaatgggcaggtagccggatcaagcgtatgcagccgccgcattgcatcagccatgatggatactttctcggcaggagcaaggtgagatgacaggagatcctgccccggcacttcgcccaatagcagccagtcccttcccgcttcagtgacaacgtcgagcacagctgcgcaaggaacgcccgtcgtggccagccacgatagccgcgctgcctcgtcctgcagttcattcagggcaccggacaggtcggtcttgacaaaaagaaccgggcgcccctgcgctgacagccggaacacggcggcatcagagcagccgattgcctgttgtgcccagtcatagccgaatagcctctccacccaagcggccggagaacctgcgtgcaatccatcttgttcaatggccgatcccataacaccccttgtattactgtttatgtaagcagacagttttactgttcgtgatgatatatttttatcttgtgcaatgtaacaggttgtggccatagcgggcccgggattttcctccacgtccccgcatgttagaagacttcccctgccctcggctctggaagttcctatactttctagagaataggaacttcccgccagaatgcgttcgcacagccgccagccggtcactccgttgatggttactcggaacagcagggagccgtcggggttgatcaggcgctcgtcgataattttgttgccgttccacagggtccctgttacagtgatctttttgccgtcgaacacggcgatgccttcatacggccgtccgaaatagtcgatcatgttcggcgtaaccccgtcgattaccagtgtgccatagtgcaggatcaccttaaagtgatgatcatccacagggtacaccaccttaaaaattttttcgatctggcccatttggtcgccgctcagaccttcatacgggatgatgacatggatgtcgatcttcagcccattttcaccgctcaggacaatcctttggatcggagttacggacaccccgagattctgaaacaaactggacacacctccctgttcaaggacttggtccaggttgtagccggctgtctgtcgccagtccccaacgaaatcttcgagtgtgaagaccatggatccgggcccggggttttcttcaacgtctccagcctgcttcagcaggctgaagttagtagctccgcttcctcgagctcgagatctggcgaaggcgatgggggtcttgaaggcgtgctggtactccacgatgcccagctcggtgttgctgtgcagctcctccacgcggcggaaggcgaacatggggcccccgttctgcaggatgctggggtggatggcgctcttgaagtgcatgtggctgtccaccacgaagctgtagtagccgccgtcgcgcaggctgaaggtgcgggcgaagctgcccaccagcacgttatcgcccatggggtgcaggtgctccacggtggcgttgctgcggatgatcttgtcggtgaagatcacgctgtcctcggggaagccggtgcccaccaccttgaagtcgccgatcacgcggccggcctcgtagcggtagctgaagctcacgtgcagcacgccgccgtcctcgtacttctcgatgcgggtgttggtgtagccgccgttgttgatggcgtgcaggaaggggttctcgtagccgctggggtaggtgccgaagtggtagaagccgtagcccatcacgtggctcagcaggtaggggctgaaggtcagggcgcctttggtgctcttcatcttgttggtcatgcggccctgctcgggggtgccctctccgccgcccaccagctcgaactccacgccgttcagggtgccggtgatgcggcactcgatcttcatggcgggcatggtggcgaccggtagcgctagcggcttcggtaccacgcgttcgctcgaattaatcaattctttgccaaaatgatgagacagcacaataaccagcacgttgcccaggagctgtaggaaaaagaagaaggcatgaacatggttagcagaggctctagagccgccggtcacacgccagaagccgaaccccgccctgccccgtcccccccgaaggcagccgtccccccgcggacagccccgaggctggagagggagaaggggacggcggcgcggcgacgcacgaaggccctccccgcccatttccttcctgccggggccctcccggagcccctcaaggctttcacgcagccacagaaaagaaacaagccgtcattaaaccaagcgctaattacagcccggaggagaagggccgtcccgcccgctcacctgtgggagtaacgcggtcagtcagagccggggcgggcggcgcgaggcggcgcggagcggggcacggggcgaaggcaacgcagcgactcccgcccgccgcgcgcttcgctttttatagggccgccgccgccgccgcctcgccataaaaggaaactttcggagcgcgccgctctgattggctgccgccgcacctctccgcctcgccccgccccgcccctcgccccgccccgccccgcctggcgcgcgccccccccccccccccgcccccatcgctgcacaaaataattaaaaaataaataaatacaaaattgggggtggggaggggggggagatggggagagtgaagcagaacgtggggctcacctcgaccatggtaatagcgatgactaatacgtagatgtactgccaagtaggaaagtcccataaggtcatgtactgggcataatgccaggcgggccatttaccgtcattgacgtcaatagggggcgtacttggcatatgatacacttgatgtactgccaagtgggcagtttaccgtaaatactccacccattgacgtcaatggaaagtccctattggcgttactatgggaacatacgtcattattgacgtcaatgggcgggggtcgttgggcggtcagccaggcgggccatttaccgtaagttatgtaacgcggaacaacaacaattgcattcattttatgtttcaggttcagggggaggtgtggtcctgcgattccatcgagtgcacctacaccctgctgaagaccctatgcggcctaagagacctgctaccaatgaattaaaaaaaaatgattaataaaaaatcacttacttgaaatcagcaataaggtctctgttgaaattttctcccagcagcacctcacttccctcttcccaactctggtattctaaaccccgttcagcggcatactttctccatactttaaaggggatgtcaaattttagctcctctcctgtacccacaatcttcatgtctttcttcccagatgaccaagagagtccggctcagtgactccttcaaccctgtctacccctatgaagatgaaagcacctcccaacacccctttataaacccagggtttatttccccaaatggcttcacacaaagcccagacggagttcttactttaaaatgtttaaccccactaacaaccacaggcggatctctacagctaaaagtgggagggggacttacagtggatgacactgatggtaccttacaagaaaacatacgtgctacagcacccattactaaaaataatcactctgtagaactatccattggaaatggattagaaactcaaaacaataaactatgtgccaaattgggaaatgggttaaaatttaacaacggtgacatttgtataaaggatagtattaacaccttatggactggaataaaccctccacctaactgtcaaattgtggaaaacactaatacaaatgatggcaaacttactttagtattagtaaaaaatggagggcttgttaatggctacgtgtctctagttggtgtatcagacactgtgaaccaaatgttcacacaaaagacagcaaacatccaattaagattatattttgactcttctggaaatctattaactgaggaatcagacttaaaaattccacttaaaaataaatcttctacagcgaccagtgaaactgtagccagcagcaaagcctttatgccaagtactacagcttatcccttcaacaccactactagggatagtgaaaactacattcatggaatatgttactacatgactagttatgatagaagtctatttcccttgaacatttctataatgctaaacagccgtatgatttcttccaatgttgcctatgccatacaatttgaatggaatctaaatgcaagtgaatctccagaaagcaacatagctacgctgaccacatccccctttttcttttcttacattacagaagacgacaactaaaataaagtttaagtgtttttatttaaaatcacaaaattcgagtagttattttgcctccaccttcccatttgacagaatacacagtcctttctccccggctggccttaaaaagcatcatatcatgggtaacagacatattcttaggtgttatattccacacggtttcctgtcgagccaaacgctcatcagtgatattaataaactccccgggcagctcacttaagttcatgtcgctgtccagctgctgagccacaggctgctgtccaacttgcggttgcttaacgggcggcgaaggagaagtccacgcctacatgggggtagagtcataatcgtgcatcaggatagggcggtggtgctgcagcagcgcgcgaataaactgctgccgccgccgctccgtcctgcaggaatacaacatggcagtggtctcctcagcgatgattcgcaccgcccgcagcataaggcgccttgtcctccgggcacagcagcgcaccctgatctcacttaaatcagcacagtaactgcagcacagcaccacaatattgttcaaaatcccacagtgcaaggcgctgtatccaaagctcatggcggggaccacagaacccacgtggccatcataccacaagcgcaggtagattaagtggcgacccctcataaacacgctggacataaacattacctcttttggcatgttgtaattcaccacctcccggtaccatataaacctctgattaaacatggcgccatccaccaccatcctaaaccagctggccaaaacctgcccgccggctatacactgcagggaaccgggactggaacaatgacagtggagagcccaggactcgtaaccatggatcatcatgctcgtcatgatatcaatgttggcacaacacaggcacacgtgcatacacttcctcaggattacaagctcctcccgcgttagaaccatatcccagggaacaacccattcctgaatcagcgtaaatcccacactgcagggaagacctcgcacgtaactcacgttgtgcattgtcaaagtgttacattcgggcagcagcggatgatcctccagtatggtagcgcgggtttctgtctcaaaaggaggtagacgatccctactgtacggagtgcgccgagacaaccgagatcgtgttggtcgtagtgtcatgccaaatggaacgccggacgtagtcattctcgtattttgtatagcaaaacgcggccctggcagaacacactcttcttcgccttctatcctgccgcttagcgtgttccgtgtgatagttcaagtacagccacactcttaagttggtcaaaagaatgctggcttcagttgtaatcaaaactccatcgcatctaattgttctgaggaaatcatccacggtagcatatgcaaatcccaaccaagcaatgcaactggattgcgtttcaagcaggagaggagagggaagagacggaagaaccatgttaatttttattccaaacgatctcgcagtacttcaaattgtagatcgcgcagatggcatctctcgcccccactgtgttggtgaaaaagcacagctaaatcaaaagaaatgcgattttcaaggtgctcaacggtggcttccaacaaagcctccacgcgcacatccaagaacaaaagaataccaaaagaaggagcattttctaactcctcaatcatcatattacattcctgcaccattcccagataattttcagctttccagccttgaattattcgtgtcagttcttgtggtaaatccaatccacacattacaaacaggtcccggagggcgccctccaccaccattcttaaacacaccctcataatgacaaaatatcttgctcctgtgtcacctgtagcgaattgagaatggcaacatcaattgacatgcccttggctctaagttcttctttaagttctagttgtaaaaactctctcatattatcaccaaactgcttagccagaagccccccgggaacaagagcaggggacgctacagtgcagtacaagcgcagacctccccaattggctccagcaaaaacaagattggaataagcatattgggaaccaccagtaatatcatcgaagttgctggaaatataatcaggcagagtttcttgtagaaattgaataaaagaaaaatttgccaaaaaaacattcaaaacctctgggatgcaaatgcaataggttaccgcgctgcgctccaacattgttagttttgaattagtctgcaaaaataaaaaaaaaacaagcgtcatatcatagtagcctgacgaacaggtggataaatcagtctttccatcacaagacaagccacagggtctccagctcgaccctcgtaaaacctgtcatcgtgattaaacaacagcaccgaaagttcctcgcggtgaccagcatgaataagtcttgatgaagcatacaatccagacatgttagcatcagttaaggagaaaaaacagccaacatagcctttgggtataattatgcttaatcgtaagtatagcaaagccacccctcgcggatacaaagtaaaaggcacaggagaataaaaaatataattatttctctgctgctgtttaggcaacgtcgcccccggtccctctaaatacacatacaaagcctcatcagccatggcttaccagagaaagtacagcgggcacacaaaccacaagctctaaagtcactctccaacctctccacaatatatatacacaagccctaaactgacgtaatgggactaaagtgtaaaaaatcccgccaaacccaacacacaccccgaaactgcgtcaccagggaaaagtacagtttcacttccgcaatcccaacaagcgtcacttcctctttctcacggtacgtcacatcccattaacttacaacgtcattttcccacggccgcgccgccccttttaaccgttaaccccacagccaatcaccacacggcccacactttttaaaatcacctcatttacatattggcaccattccatctataaggtatattattgatgatggccaagctatttaggtgacactatagaatactcaagctatgcatcaagcttggtaccgagctcggatccactagtaacggccgccagtgtgctggaattcgcccttgtttaaacgcgatcgcttgagatcgttttggtctgcgcgtaatctcttgctctgaaaacgaaaaaaccgccttgcagggcggtttttcgaaggttctctgagctaccaactctttgaaccgaggtaactggcttggaggagcgcagtcaccaaaacttgtcctttcagtttagccttaaccggcgcatgacttcaagactaactcctctaaatcaattaccagtggctgctgccagtggtgcttttgcatgtctttccgggttggactcaagacgatagttaccggataaggcgcagcggtcggactgaacggggggttcgtgcatacagtccagcttggagcgaactgcctacccggaactgagtgtcaggcgtggaatgagacaaacgcggccataacagcggaatgacaccggtaaaccgaaaggcaggaacaggagagcgcacgagggagccgccagggggaaacgcctggtatctttatagtcctgtcgggtttcgccaccactgatttgagcgtcagatttcgtgatgcttgtcaggggggcggagcctatggaaaaacggctttgccgcggccctctcacttccctgttaagtatcttcctggcatcttccaggaaatctccgccccgttcgtaagccatttccgctcgccgcagtcgaacgaccgagcgtagcgagtcagtgagcgaggaagcggaatatatcctgtatcacatattctgctgacgcaccggtgcagccttttttctcctgccacatgaagcacttcactgacaccctcatcagtgccaacatagtaagccagtatacactccgctagcgcgatcgcttaattaatttaaatcctgcagggtttaaacggccggcctagggataacagggtaatcgtaactataacggtcctaaggtagcgaatgatgtccggcggtgcttttgccgttacgcaccaccccgtcagtagctgaacaggagggacagctgatagaaacagaagccactggagcacctcaaaaacaccatcatacactaaatcagtaagttggcagcatcacccgacgcactttgcgccgaataaatacctgtgacggaagatcacttcgcagaataaataaatcctggtgtccctgttgataccgggaagccctgggccaacttttggcgaaaatgagacgttgtcggcacgtaagaggttccaactttcaccataatgaaataagatcactaccgggcgtattttttgagttatcgagattttcaggagctaaggaagctaaaatggagaaaaaaatcactggatataccaccgttgatatatcccaatggcatcgtaaagaacattttgaggcatttcagtcagttgctcaatgtacctataaccagaccgttcagctggatattacggcctttttaaagaccgtaaagaaaaataagcacaagttttatccggcctttattcacattcttgcccgcctgatgaatgctcatccggaattccgtatggcaatgaaagacggtgagctggtgatatgggatagtgttcacccttgttacaccgttttccatgagcaaactgaaacgttttcatcgctctggagtgaataccacgacgatttccggcagtttctacacatatattcgcaagatgtggcgtgttacggtgaaaacctggcctatttccctaaagggtttattgagaatatgtttttcgtctcagccaatccctgggtgagtttcaccagttttgatttaaacgtggccaatatggacaacttcttcgcccccgttttcaccatgggcaaatattatacgcaaggcgacaaggtgctgatgccgctggcgattcaggttcatcatgccgtctgtgatggcttccatgtcggcagaatgcttaatgaattacaacagtactgcgatgagtggcagggcggggcgtaacctgcaggttaattaaggaagggcgaattctgcagatatccatcacactggcggccgctcgagcatgcatctagagggcccaattcgccctatagtgagtcgtattacaattcactggcc

SEQ ID NO: 175 - DNA, 34834 bp, Artificial Sequence
  PS1
catcatcaataatataccttatagatggaatggtgccaatatgtaaatgaggtgattttaaaaagtgtgggccgtgtggtgattggctgtggggttaacggttaaaaggggcggcgcggccgtgggaaaatgacgttttatgggggtggagtttttttgcaagttgtcgcgggaaatgataacttcgtatagcatacattatacgaagttatttacgcataaaaaggcttcttttctcacggaactacttagttttcccacggtatttaacaggaaatgaggtagttttgaccggatgcaagtgaaaattgctgattttcgcgcgaaaactgaatgaggaagtgtttttctgaataatgtggtatttatggcagggtgataacttcgtatagcatacattatacgaagttatggaatgtttatgccttaccagtgtaacatgaatcatgtgaaagtgttgttggaaccagatgccttttccagaatgagcctaacaggaatctttgacatgaacacgcaaatctggaagatcctgaggtatgatgatacgagatcgagggtgcgcgcatgcgaatgcggaggcaagcatgccaggttccagccggtgtgtgtagatgtgaccgaagatctcagaccggatcatttggttattgcccgcactggagcagagttcggatccagtggagaagaaactgactaaggtgagtattgggaaaactttggggtgggattttcagatggacagattgagtaaaaatttgttttttctgtcttgcagctgacatgagtggaaatgcttcttttaaggggggagtcttcagcccttatctgacagggcgtctcccatcctgggcaggagttcgtcagaatgttatgggatctactgtggatggaagacccgttcaacccgccaattcttcaacgctgacctatgctactttaagttcttcacctttggacgcagctgcagccgctgccgccgcctctgtcgccgctaacactgtgcttggaatgggttactatggaagcatcgtggctaattccacttcctctaataacccttctacactgactcaggacaagttacttgtccttttggcccagctggaggctttgacccaacgtctgggtgaactttctcagcaggtggccgagttgcgagtacaaactgagtctgctgtcggcacggcaaagtctaaataaaaaaaattccagaatcaatgaataaataaacgagcttgttgttgatttaaaatcaagtgtttttatttcatttttcgcgcacggtatgccctggaccaccgatctcgatcattgagaactcggtggattttttccagaatcctatagaggtgggattgaatgtttagatacatgggcattaggccgtctttggggtggagatagctccattgaagggattcatgctccggggtagtgttgtaaatcacccagtcataacaaggtcgcagtgcatggtgttgcacaatatcttttagaagtaggctgattgccacagataagcccttggtgtaggtgtttacaaaccggttgagctgggaggggtgcattcgaggtgaaattatgtgcattttggattggatttttaagttggcaatattgccgccaagatcccgtcttgggttcatgttatgaaggactaccaagacggtgtatccggtacatttaggaaatttatcgtgcagcttggatggaaaagcgtggaaaaatttggagacacccttgtgtcctccgagattttccatgcactcatccatgataatagcaatggggccgtgggcagcggcgcgggcaaacacgttccgtgggtctgacacatcatagttatgttcctgagttaaatcatcataagccattttaatgaatttggggcggagcgtaccagattggggtatgaatgttccttcgggccccggagcatagttcccctcacagatttgcatttcccaagctttcagttctgagggtggaatcatgtccacctggggggctatgaagaacaccgtttcgggggcgggggtgattagttgggatgatagcaagtttctgagcaattgagatttgccacatccggtggggccataaataattccgattacaggttgcaggtggtagtttagggaacggcaactgccgtcttctcgaagcaagggggccacctcgttcatcatttcccttacatgcatattttcccgcaccaaatccattaggaggcgctctcctcctagtgatagaagttcttgtagtgaggaaaagtttttcagcggttttagaccgtcagccatgggcattttggaaagagtttgctgcaaaagttctagtctgttccacagttcagtgatgtgttctatggcatctcgatccagcagacctcctcgtttcgcgggtttggacggctcctggagtagggtatgagacgatgggcgtccagcgctgccagggttcggtccttccagggtctcagtgttcgagtcagggttgtttccgtcacagtgaaggggtgtgcgcctgcttgggcgcttgccagggtgcgcttcagactcattctgctggtggagaacttctgtcgcttggcgccctgtatgtcggccaagtagcagtttaccatgagttcgtagttgagcgcctcggctgcgtggcctttggcgcggagcttacctttggaagttttcttgcataccgggcagtataggcatttcagcgcatacagcttgggcgcaaggaaaatggattctggggagtatgcatccgcgccgcaggaggcgcaaacagtttcacattccaccagccaggttaaatccggttcattggggtcaaaaacaagttttccgccatattttttgatgcgtttcttacctttggtctccataagttcgtgtcctcgttgagtgacaaacaggctgtccgtatctccgtagactgattttacaggcctcttctccagtggagtgcctcggtcttcttcgtacaggaactctgaccactctgatacaaaggcgcgcgtccaggccagcacaaaggaggctatgtgggaggggtagcgatcgttgtcaaccagggggtccaccttttccaaagtatgcaaacacatgtcaccctcttcaacatccaggaatgtgattggcttgtaggtgtatttcacgtgacctggggtccccgctgggggggtataaaagggggcggttctttgctcttcctcactgtcttccggatcgctgtccaggaacgtcagctgttggggtaggtattccctctcgaaggcgggcatgacctctgcactcaggttgtcagtttctaagaacgaggaggatttgatattgacagtgccggttgagatgcctttcatgaggttttcgtccatttggtcagaaaacacaatttttttattgtcaagtttggtggcaaatgatccatacagggcgttggataaaagtttggcaatggatcgcatggtttggttcttttccttgtccgcgcgctctttggcggcgatgttgagttggacatactcgcgtgccaggcacttccattcggggaagatagttgttaattcatctggcacgattctcacttgccaccctcgattatgcaaggtaattaaatccacactggtggccacctcgcctcgaaggggttcattggtccaacagagcctacctcctttcctagaacagaaagggggaagtgggtctagcataagttcatcgggagggtctgcatccatggtaaagattcccggaagtaaatccttatcaaaatagctgatgggagtggggtcatctaaggccatttgccattctcgagctgccagtgcgcgctcatatgggttaaggggactgccccagggcatgggatgggtgagagcagaggcatacatgccacagatgtcatagacgtagatgggatcctcaaagatgcctatgtaggttggatagcatcgcccccctctgatacttgctcgcacatagtcatatagttcatgtgatggcgctagcagccccggacccaagttggtgcgattgggtttttctgttctgtagacgatctggcgaaagatggcgtgagaattggaagagatggtgggtctttgaaaaatgttgaaatgggcatgaggtagacctacagagtctctgacaaagtgggcataagattcttgaagcttggttaccagttcggcggtgacaagtacgtctagggcgcagtagtcaagtgtttcttgaatgatgtcataacctggttggtttttcttttcccacagttcgcggttgagaaggtattcttcgcgatccttccagtactcttctagcggaaacccgtctttgtctgcacggtaagatcctagcatgtagaactgattaactgccttgtaagggcagcagcccttctctacgggtagagagtatgcttgagcagcttttcgtagcgaagcgtgagtaagggcaaaggtgtctctgaccatgactttgagaaattggtatttgaagtccatgtcgtcacaggctccctgttcccagagttggaagtctacccgtttcttgtaggcggggttgggcaaagcgaaagtaacatcattgaagagaatcttaccggctctgggcataaaattgcgagtgatgcggaaaggctgtggtacttccgctcgattgttgatcacctgggcagctaggacgatttcgtcgaaaccgttgatgttgtgtcctacgatgtataattctatgaaacgcggcgtgcctctgacgtgaggtagcttactgagctcatcaaaggttaggtctgtggggtcagataaggcgtagtgttcgagagcccattcgtgcaggtgaggatttgcatgtaggaatgatgaccaaagatctaccgccagtgctgtttgtaactggtcccgatactgacgaaaatgccggccaattgccattttttctggagtgacacagtagaaggttctggggtcttgttgccatcgatcccacttgagtttaatggctagatcgtgggccatgttgacgagacgctcttctcctgagagtttcatgaccagcatgaaaggaactagttgtttgccaaaggatcccatccaggtgtaagtttccacatcgtaggtcaggaagagtctttctgtgcgaggatgagagccgatcgggaagaactggatttcctgccaccagttggaggattggctgttgatgtgatggaagtagaagtttctgcggcgcgccgagcattcgtgtttgtgcttgtacagacggccgcagtagtcgcagcgttgcacgggttgtatctcgtgaatgagctgtacctggcttcccttgacgagaaatttcagtgggaagccgaggcctggcgattgtatctcgtgctcttctatattcgctgtatcggcctgttcatcttctgtttcgatggtggtcatgctgacgagcccccgcgggaggcaagtccagacctcggcgcgggaggggcggagctgaaggacgagagcgcgcaggctggagctgtccagagtcctgagacgctgcggactcaggttagtaggtagggacagaagattaacttgcatgatcttttccagggcgtgcgggaggttcagatggtacttgatttccacaggttcgtttgtagagacgtcaatggcttgcagggttccgtgtcctttgggcgccactaccgtacctttgttttttcttttgatcggtggtggctctcttgcttcttgcatgctcagaagcggtgacggggacgcgcgccgggcggcagcggttgttccggacccgggggcatggctggtagtggcacgtcggcgccgcgcacgggcaggttctggtattgcgctctgagaagacttgcgtgcgccaccacgcgtcgattgacgtcttgtatctgacgtctctgggtgaaagctaccggccccgtgagcttgaacctgaaagagagttcaacagaatcaatttcggtatcgttaacggcagcttgtctcagtatttcttgtacgtcaccagagttgtcctggtaggcgatctccgccatgaactgctcgatttcttcctcctgaagatctccgcgacccgctctttcgacggtggccgcgaggtcattggagatacggcccatgagttgggagaatgcattcatgcccgcctcgttccagacgcggctgtaaaccacggccccctcggagtctcttgcgcgcatcaccacctgagcgaggttaagctccacgtgtctggtgaagaccgcatagttgcataggcgctgaaaaaggtagttgagtgtggtggcaatgtgttcggcgacgaagaaatacatgatccatcgtctcagcggcatttcgctaacatcgcccagagcttccaagcgctccatggcctcgtagaagtccacggcaaaattaaaaaactgggagtttcgcgcggacacggtcaattcctcctcgagaagacggatgagttcggctatggtggcccgtacttcgcgttcgaaggctcccgggatctcttcttcctcttctatctcttcttccactaacatctcttcttcgtcttcaggcgggggcggagggggcacgcggcgacgtcgacggcgcacgggcaaacggtcgatgaatcgttcaatgacctctccgcggcggcggcgcatggtttcagtgacggcgcggccgttctcgcgcggtcgcagagtaaaaacaccgccgcgcatctccttaaagtggtgactgggaggttctccgtttgggagggagagggcgctgattatacattttattaattggcccgtagggactgcgcgcagagatctgatcgtgtcaagatccacgggatctgaaaacctttcgacgaaagcgtctaaccagtcacagtcacaaggtaggctgagtacggcttcttgtgggcgggggtggttatgtgttcggtctgggtcttctgtttcttcttcatctcgggaaggtgagacgatgctgctggtgatgaaattaaagtaggcagttctaagacggcggatggtggcgaggagcaccaggtctttgggtccggcttgctggatacgcaggcgattggccattccccaagcattatcctgacatctagcaagatctttgtagtagtcttgcatgagccgttctacgggcacttcttcctcacccgttctgccatgcatacgtgtgagtccaaatccgcgcattggttgtaccagtgccaagtcagctacgactctttcggcgaggatggcttgctgtacttgggtaagggtggcttgaaagtcatcaaaatccacaaagcggtggtaagcccctgtattaatggtgtaagcacagttggccatgactgaccagttaactgtctggtgaccagggcgcacgagctcggtgtatttaaggcgcgaataggcgcgggtgtcaaagatgtaatcgttgcaggtgcgcaccagatactggtaccctataagaaaatgcggcggtggttggcggtagagaggccatcgttctgtagctggagcgccaggggcgaggtcttccaacataaggcggtgatagccgtagatgtacctggacatccaggtgattcctgcggcggtagtagaagcccgaggaaactcgcgtacgcggttccaaatgttgcgtagcggcatgaagtagttcattgtaggcacggtttgaccagtgaggcgcgcgcagtcattgatgctctatagacacggagaaaatgaaagcgttcagcgactcgactccgtagcctggaggaacgtgaacgggttgggtcgcggtgtaccccggttcgagacttgtactcgagccggccggagccgcggctaacgtggtattggcactcccgtctcgacccagcctacaaaaatccaggatacggaatcgagtcgttttgctggtttccgaatggcagggaagtgagtcctattttttttttttttgccgctcagatgcatcccgtgctgcgacagatgcgcccccaacaacagcccccctcgcagcagcagcagcagcaaccacaaaaggctgtccctgcaactactgcaactgccgccgtgagcggtgcgggacagcccgcctatgatctggacttggaagagggcgaaggactggcacgtctaggtgcgccttcgcccgagcggcatccgcgagttcaactgaaaaaagattctcgcgaggcgtatgtgccccaacagaacctatttagagacagaagcggcgaggagccggaggagatgcgagcttcccgctttaacgcgggtcgtgagctgcgtcacggtttggaccgaagacgagtgttgcgagacgaggatttcgaagttgatgaagtgacagggatcagtcctgccagggcacacgtggctgcagccaaccttgtatcggcttacgagcagacagtaaaggaagagcgtaacttccaaaagtcttttaataatcatgtgcgaaccctgattgcccgcgaagaagttacccttggtttgatgcatttgtgggatttgatggaagctatcattcagaaccctactagcaaacctctgaccgcccagctgtttctggtggtgcaacacagcagagacaatgaggctttcagagaggcgctgctgaacatcaccgaacccgaggggagatggttgtatgatcttatcaacattctacagagtatcatagtgcaggagcggagcctgggcctggccgagaaggtagctgccatcaattactcggttttgagcttgggaaaatattacgctcgcaaaatctacaagactccatacgttcccatagacaaggaggtgaagatagatgggttctacatgcgcatgacgctcaaggtcttgaccctgagcgatgatcttggggtgtatcgcaatgacagaatgcatcgcgcggttagcgccagcaggaggcgcgagttaagcgacagggaactgatgcacagtttgcaaagagctctgactggagctggaaccgagggtgagaattacttcgacatgggagctgacttgcagtggcagcctagtcgcagggctctgagcgccgcgacggcaggatgtgagcttccttacatagaagaggcggatgaaggcgaggaggaagagggcgagtacttggaagactgatggcacaacccgtgttttttgctagatggaacagcaagcaccggatcccgcaatgcgggcggcgctgcagagccagccgtccggcattaactcctcggacgattggacccaggccatgcaacgtatcatggcgttgacgactcgcaaccccgaagcctttagacagcaaccccaggccaaccgtctatcggccatcatggaagctgtagtgccttcccgatctaatcccactcatgagaaggtcctggccatcgtgaacgcgttggtggagaacaaagctattcgtccagatgaggccggactggtatacaacgctctcttagaacgcgtggctcgctacaacagtagcaatgtgcaaaccaatttggaccgtatgataacagatgtacgcgaagccgtgtctcagcgcgaaaggttccagcgtgatgccaacctgggttcgctggtggcgttaaatgctttcttgagtactcagcctgctaatgtgccgcgtggtcaacaggattatactaactttttaagtgctttgagactgatggtatcagaagtacctcagagcgaagtgtatcagtccggtcctgattacttctttcagactagcagacagggcttgcagacggtaaatctgagccaagcttttaaaaaccttaaaggtttgtggggagtgcatgccccggtaggagaaagagcaaccgtgtctagcttgttaactccgaactcccgcctgttattactgttggtagctcctttcaccgacagcggtagcatcgaccgtaattcctatttgggttacctactaaacctgtatcgcgaagccatagggcaaagtcaggtggacgagcagacctatcaagaaattacccaagtcagtcgcgctttgggacaggaagacactggcagtttggaagccactctgaacttcttgcttaccaatcggtctcaaaagatccctcctcaatatgctcttactgcggaggaggagaggatccttagatatgtgcagcagagcgtgggattgtttctgatgcaagagggggcaactccgactgcagcactggacatgacagcgcgaaatatggagcccagcatgtatgccagtaaccgacctttcattaacaaactgctggactacttgcacagagctgccgctatgaactctgattatttcaccaatgccatcttaaacccgcactggctgcccccacctggtttctacacgggcgaatatgacatgcccgaccctaatgacggatttctgtgggacgacgtggacagcgatgttttttcacctctttctgatcatcgcacgtggaaaaaggaaggcggtgatagaatgcattcttctgcatcgctgtccggggtcatgggtgctaccgcggctgagcccgagtctgcaagtccttttcctagtctacccttttctctacacagtgtacgtagcagcgaagtgggtagaataagtcgcccgagtttaatgggcgaagaggagtacctaaacgattccttgctcagaccggcaagagaaaaaaatttcccaaacaatggaatagaaagtttggtggataaaatgagtagatggaagacttatgctcaggatcacagagacgagcctgggatcatggggactacaagtagagcgagccgtagacgccagcgccatgacagacagaggggtcttgtgtgggacgatgaggattcggccgatgatagcagcgtgttggacttgggtgggagaggaaggggcaacccgtttgctcatttgcgccctcgcttgggtggtatgttgtgaaaaaaaataaaaaagaaaaactcaccaaggccatggcgacgagcgtacgttcgttcttctttattatctgtgtctagtataatgaggcgagtcgtgctaggcggagcggtggtgtatccggagggtcctcctccttcgtacgagagcgtgatgcagcagcagcaggcgacggcggtgatgcaatccccactggaggctccctttgtgcctccgcgatacctggcacctacggagggcagaaacagcattcgttactcggaactggcacctcagtacgataccaccaggttgtatctggtggacaacaagtcggcggacattgcttctctgaactatcagaatgaccacagcaacttcttgaccacggtggtgcagaacaatgactttacccctacggaagccagcacccagaccattaactttgatgaacgatcgcggtggggcggtcagctaaagaccatcatgcatactaacatgccaaacgtgaacgagtatatgtttagtaacaagttcaaagcgcgtgtgatggtgtccagaaaacctcccgacggtgctgcagttggggatacttatgatcacaagcaggatattttggaatatgagtggttcgagtttactttgccagaaggcaacttttcagttactatgactattgatttgatgaacaatgccatcatagataattacttgaaagtgggtagacagaatggagtgcttgaaagtgacattggtgttaagttcgacaccaggaacttcaagctgggatgggatcccgaaaccaagttgatcatgcctggagtgtatacgtatgaagccttccatcctgacattgtcttactgcctggctgcggagtggattttaccgagagtcgtttgagcaaccttcttggtatcagaaaaaaacagccatttcaagagggttttaagattttgtatgaagatttagaaggtggtaatattccggccctcttggatgtagatgcctatgagaacagtaagaaagaacaaaaagccaaaatagaagctgctacagctgctgcagaagctaaggcaaacatagttgccagcgactctacaagggttgctaacgctggagaggtcagaggagacaattttgcgccaacacctgttccgactgcagaatcattattggccgatgtgtctgaaggaacggacgtgaaactcactattcaacctgtagaaaaagatagtaagaatagaagctataatgtgttggaagacaaaatcaacacagcctatcgcagttggtatctttcgtacaattatggcgatcccgaaaaaggagtgcgttcctggacattgctcaccacctcagatgtcacctgcggagcagagcaggtttactggtcgcttccagacatgatgaaggatcctgtcactttccgctccactagacaagtcagtaactaccctgtggtgggtgcagagcttatgcccgtcttctcaaagagcttctacaacgaacaagctgtgtactcccagcagctccgccagtccacctcgcttacgcacgtcttcaaccgctttcctgagaaccagattttaatccgtccgccggcgcccaccattaccaccgtcagtgaaaacgttcctgctctcacagatcacgggaccctgccgttgcgcagcagtatccggggagtccaacgtgtgaccgttactgacgccagacgccgcacctgtccctacgtgtacaaggcactgggcatagtcgcaccgcgcgtcctttcaagccgcactttctaaaaaaaaaatgtccattcttatctcgcccagtaataacaccggttggggtctgcgcgctccaagcaagatgtacggaggcgcacgcaaacgttctacccaacatcccgtgcgtgttcgcggacattttcgcgctccatggggtgccctcaagggccgcactcgcgttcgaaccaccgtcgatgatgtaatcgatcaggtggttgccgacgcccgtaattatactcctactgcgcctacatctactgtggatgcagttattgacagtgtagtggctgacgctcgcaactatgctcgacgtaagagccggcgaaggcgcattgccagacgccaccgagctaccactgccatgcgagccgcaagagctctgctacgaagagctagacgcgtggggcgaagagccatgcttagggcggccagacgtgcagcttcgggcgccagcgccggcaggtcccgcaggcaagcagccgctgtcgcagcggcgactattgccgacatggcccaatcgcgaagaggcaatgtatactgggtgcgtgacgctgccaccggtcaacgtgtacccgtgcgcacccgtccccctcgcacttagaagatactgagcagtctccgatgttgtgtcccagcggcgaggatgtccaagcgcaaatacaaggaagaaatgctgcaggttatcgcacctgaagtctacggccaaccgttgaaggatgaaaaaaaaccccgcaaaatcaagcgggttaaaaaggacaaaaaagaagaggaagatggcgatgatgggctggcggagtttgtgcgcgagtttgccccacggcgacgcgtgcaatggcgtgggcgcaaagttcgacatgtgttgagacctggaacttcggtggtctttacacccggcgagcgttcaagcgctacttttaagcgttcctatgatgaggtgtacggggatgatgatattcttgagcaggcggctgaccgattaggcgagtttgcttatggcaagcgtagtagaataacttccaaggatgagacagtgtcaatacccttggatcatggaaatcccacccctagtcttaaaccggtcactttgcagcaagtgttacccgtaactccgcgaacaggtgttaaacgcgaaggtgaagatttgtatcccactatgcaactgatggtacccaaacgccagaagttggaggacgttttggagaaagtaaaagtggatccagatattcaacctgaggttaaagtgagacccattaagcaggtagcgcctggtctgggggtacaaactgtagacattaagattcccactgaaagtatggaagtgcaaactgaacccgcaaagcctactgccacctccactgaagtgcaaacggatccatggatgcccatgcctattacaactgacgccgccggtcccactcgaagatcccgacgaaagtacggtccagcaagtctgttgatgcccaattatgttgtacacccatctattattcctactcctggttaccgaggcactcgctactatcgcagccgaaacagtacctcccgccgtcgccgcaagacacctgcaaatcgcagtcgtcgccgtagacgcacaagcaaaccgactcccggcgccctggtgcggcaagtgtaccgcaatggtagtgcggaacctttgacactgccgcgtgcgcgttaccatccgagtatcatcacttaatcaatgttgccgctgcctccttgcagatatggccctcacttgtcgccttcgcgttcccatcactggttaccgaggaagaaactcgcgccgtagaagagggatgttgggacgcggaatgcgacgctacaggcgacggcgtgctatccgcaagcaattgcggggtggttttttaccagccttaattccaattatcgctgctgcaattggcgcgataccaggcatagcttccgtggcggttcaggcctcgcaacgacattgacattggaaaaaaaacgtataaataaaaaaaaatacaatggactctgacactcctggtcctgtgactatgttttcttagagatggaagacatcaatttttcatccttggctccgcgacacggcacgaagccgtacatgggcacctggagcgacatcggcacgagccaactgaacgggggcgccttcaattggagcagtatctggagcgggcttaaaaattttggctcaaccataaaaacatacgggaacaaagcttggaacagcagtacaggacaggcgcttagaaataaacttaaagaccagaacttccaacaaaaagtagtcgatgggatagcttccggcatcaatggagtggtagatttggctaaccaggctgtgcagaaaaagataaacagtcgtttggacccgccgccagcaaccccaggtgaaatgcaagtggaggaagaaattcctccgccagaaaaacgaggcgacaagcgtccgcgtcccgatttggaagagacgctggtgacgcgcgtagatgaaccgccttcttatgaggaagcaacgaagcttggaatgcccaccactagaccgatagccccaatggccaccggggtgatgaaaccttctcagttgcatcgacccgtcaccttggatttgccccctccccctgctgctactgctgtacccgcttctaagcctgtcgctgccccgaaaccagtcgccgtagccaggtcacgtcccgggggcgctcctcgtccaaatgcgcactggcaaaatactctgaacagcatcgtgggtctaggcgtgcaaagtgtaaaacgccgtcgctgcttttaattaaatatggagtagcgcttaacttgcctatctgtgtatatgtgtcattacacgccgtcacagcagcagaggaaaaaaggaagaggtcgtgcgtcgacgctgagttactttcaagatggccaccccatcgatgctgccccaatgggcatacatgcacatcgccggacaggatgcttcggagtacctgagtccgggtctggtgcagttcgcccgcgccacagacacctacttcaatctgggaaataagtttagaaatcccaccgtagcgccgacccacgatgtgaccaccgaccgtagccagcggctcatgttgcgcttcgtgcccgttgaccgggaggacaatacatactcttacaaagtgcggtacaccctggccgtgggcgacaacagagtgctggatatggccagcacgttctttgacattaggggcgtgttggacagaggtcccagtttcaaaccctattctggtacggcttacaactctctggctcctaaaggcgctccaaatgcatctcaatggattgcaaaaggcgtaccaactgcagcagccgcaggcaatggtgaagaagaacatgaaacagaggagaaaactgctacttacacttttgccaatgctcctgtaaaagccgaggctcaaattacaaaagagggcttaccaataggtttggagatttcagctgaaaacgaatctaaacccatctatgcagataaactttatcagccagaacctcaagtgggagatgaaacttggactgacctagacggaaaaaccgaagagtatggaggcagggctctaaagcctactactaacatgaaaccctgttacgggtcctatgcgaagcctactaatttaaaaggtggtcaggcaaaaccgaaaaactcggaaccgtcgagtgaaaaaattgaatatgatattgacatggaattttttgataactcatcgcaaagaacaaacttcagtcctaaaattgtcatgtatgcagaaaatgtaggtttggaaacgccagacactcatgtagtgtacaaacctggaacagaagacacaagttccgaagctaatttgggacaacagtctatgcccaacagacccaactacattggcttcagagataactttattggactcatgtactataacagtactggtaacatgggggtgctggctggtcaagcgtctcagttaaatgcagtggttgacttgcaggacagaaacacagaactttcttaccaactcttgcttgactctctgggcgacagaaccagatactttagcatgtggaatcaggctgtggacagttatgatcctgatgtacgtgttattgaaaatcatggtgtggaagatgaacttcccaactattgttttccactggacggcataggtgttccaacaaccagttacaaatcaatagttccaaatggagaagataataataattggaaagaacctgaagtaaatggaacaagtgagatcggacagggtaatttgtttgccatggaaattaaccttcaagccaatctatggcgaagtttcctttattccaatgtggctctgtatctcccagactcgtacaaatacaccccgtccaatgtcactcttccagaaaacaaaaacacctacgactacatgaacgggcgggtggtgccgccatctctagtagacacctatgtgaacattggtgccaggtggtctctggatgccatggacaatgtcaacccattcaaccaccaccgtaacgctggcttgcgttaccgatctatgcttctgggtaacggacgttatgtgcctttccacatacaagtgcctcaaaaattcttcgctgttaaaaacctgctgcttctcccaggctcctacacttatgagtggaactttaggaaggatgtgaacatggttctacagagttccctcggtaacgacctgcgggtagatggcgccagcatcagtttcacgagcatcaacctctatgctacttttttccccatggctcacaacaccgcttccacccttgaagccatgctgcggaatgacaccaatgatcagtcattcaacgactacctatctgcagctaacatgctctaccccattcctgccaatgcaaccaatattcccatttccattccttctcgcaactgggcggctttcagaggctggtcatttaccagactgaaaaccaaagaaactccctctttggggtctggatttgacccctactttgtctattctggttctattccctacctggatggtaccttctacctgaaccacacttttaagaaggtttccatcatgtttgactcttcagtgagctggcctggaaatgacaggttactatctcctaacgaatttgaaataaagcgcactgtggatggcgaaggctacaacgtagcccaatgcaacatgaccaaagactggttcttggtacagatgctcgccaactacaacatcggctatcagggcttctacattccagaaggatacaaagatcgcatgtattcatttttcagaaacttccagcccatgagcaggcaggtggttgatgaggtcaattacaaagacttcaaggccgtcgccataccctaccaacacaacaactctggctttgtgggttacatggctccgaccatgcgccaaggtcaaccctatcccgctaactatccctatccactcattggaacaactgccgtaaatagtgttacgcagaaaaagttcttgtgtgacagaaccatgtggcgcataccgttctcgagcaacttcatgtctatgggggcccttacagacttgggacagaatatgctctatgccaactcagctcatgctctggacatgacctttgaggtggatcccatggatgagcccaccctgctttatcttctcttcgaagttttcgacgtggtcagagtgcatcagccacaccgcggcatcatcgaggcagtctacctgcgtacaccgttctcggccggtaacgctaccacgtaagaagcttcttgcttcttgcaaatagcagctgcaaccatggcctgcggatcccaaaacggctccagcgagcaagagctcagagccattgtccaagacctgggttgcggaccctattttttgggaacctacgataagcgcttcccggggttcatggcccccgataagctcgcctgtgccattgtaaatacggccggacgtgagacggggggagagcactggttggctttcggttggaacccacgttctaacacctgctacctttttgatccttttggattctcggatgatcgtctcaaacagatttaccagtttgaatatgagggtctcctgcgccgcagcgctcttgctaccaaggaccgctgtattacgctggaaaaatctacccagaccgtgcagggcccccgttctgccgcctgcggacttttctgctgcatgttccttcacgcctttgtgcactggcctgaccgtcccatggacggaaaccccaccatgaaattgctaactggagtgccaaacaacatgcttcattctcctaaagtccagcccaccctgtgtgacaatcaaaaagcactctaccattttcttaatacccattcgccttattttcgctctcatcgtacacacatcgaaagggccactgcgttcgaccgtatggatgttcaataatgactcatgtaaacaacgtgttcaataaacatcactttatttttttacatgtatcaaggctctggattacttatttatttacaagtcgaatgggttctgacgagaatcagaatgacccgcaggcagtgatacgttgcggaactgatacttgggttgccacttgaattcgggaatcaccaacttgggaaccggtatatcgggcaggatgtcactccacagctttctggtcagctgcaaagctccaagcaggtcaggagccgaaatcttgaaatcacaattaggaccagtgctctgagcgcgagagttgcggtacaccggattgcagcactgaaacaccatcagcgacggatgtctcacgcttgccagcacggtgggatctgcaatcatgcccacatccagatcttcagcattggcaatgctgaacggggtcatcttgcaggtctgcctacccatggcgggcacccaattaggcttgtggttgcaatcgcagtgcagggggatcagtatcatcttggcctgatcctgtctgattcctggatacacggctctcatgaaagcatcatattgcttgaaagcctgctgggctttactaccctcggtataaaacatcccgcaggacctgctcgaaaactggttagctgcacagccggcatcattcacacagcagcgggcgtcattgttggctatttgcaccacacttctgccccagcggttttgggtgattttggttcgctcgggattctcctttaaggctcgttgtccgttctcgctggccacatccatctcgataatctgctccttctgaatcataatattgccatgcaggcacttcagcttgccctcataatcattgcagccatgaggccacaacgcacagcctgtacattcccaattatggtgggcgatctgagaaaaagaatgtatcattccctgcagaaatcttcccatcatcgtgctcagtgtcttgtgactagtgaaagttaactggatgcctcggtgctcttcgtttacgtactggtgacagatgcgcttgtattgttcgtgttgctcaggcattagtttaaaacaggttctaagttcgttatccagcctgtacttctccatcagcagacacatcacttccatgcctttctcccaagcagacaccaggggcaagctaatcggattcttaacagtgcaggcagcagctcctttagccagagggtcatctttagcgatcttctcaatgcttcttttgccatccttctcaacgatgcgcacgggcgggtagctgaaacccactgctacaagttgcgcctcttctctttcttcttcgctgtcttgactgatgtcttgcatggggatatgtttggtcttccttggcttctttttggggggtatcggaggaggaggactgtcgctccgttccggagacagggaggattgtgacgtttcgctcaccattaccaactgactgtcggtagaagaacctgaccccacacggcgacaggtgtttttcttcgggggcagaggtggaggcgattgcgaagggctgcggtccgacctggaaggcggatgactggcagaaccccttccgcgttcgggggtgtgctccctgtggcggtcgcttaactgatttccttcgcggctggccattgtgttctcctaggcagagaaacaacagacatggaaactcagccattgctgtcaacatcgccacgagtgccatcacatctcgtcctcagcgacgaggaaaaggagcagagcttaagcattccaccgcccagtcctgccaccacctctaccctagaagataaggaggtcgacgcatctcatgacatgcagaataaaaaagcgaaagagtctgagacagacatcgagcaagacccgggctatgtgacaccggtggaacacgaggaagagttgaaacgctttctagagagagaggatgaaaactgcccaaaacagcgagcagataactatcaccaagatgctggaaatagggatcagaacaccgactacctcatagggcttgacggggaagacgcgctccttaaacatctagcaagacagtcgctcatagtcaaggatgcattattggacagaactgaagtgcccatcagtgtggaagagctcagctgcgcctacgagcttaaccttttttcacctcgtactccccccaaacgtcagccaaacggcacctgcgagccaaatcctcgcttaaacttttatccagcttttgctgtgccagaagtactggctacctatcacatcttttttaaaaatcaaaaaattccagtctcctgccgcgctaatcgcacccgcgccgatgccctactcaatctgggacctggttcacgcttacctgatatagcttccttggaagaggttccaaagatcttcgagggtctgggcaataatgagactcgggccgcaaatgctctgcaaaagggagaaaatggcatggatgagcatcacagcgttctggtggaattggaaggcgataatgccagactcgcagtactcaagcgaagcgtcgaggtcacacacttcgcatatcccgctgtcaacctgccccctaaagtcatgacggcggtcatggaccagttactcattaagcgcgcaagtcccctttcagaagacatgcatgacccagatgcctgtgatgagggtaaaccagtggtcagtgatgagcagctaacccgatggctgggcaccgactctccccgggatttggaagagcgtcgcaagcttatgatggccgtggtgctggttaccgtagaactagagtgtctccgacgtttctttaccgattcagaaaccttgcgcaaactcgaagagaatctgcactacacttttagacacggctttgtgcggcaggcatgcaagatatctaacgtggaactcaccaacctggtttcctacatgggtattctgcatgagaatcgcctaggacaaagcgtgctgcacagcacccttaagggggaagcccgccgtgattacatccgcgattgtgtctatctctacctgtgccacacgtggcaaaccggcatgggtgtatggcagcaatgtttagaagaacagaacttgaaagagcttgacaagctcttacagaaatctcttaaggttctgtggacagggttcgacgagcgcaccgtcgcttccgacctggcagacctcatcttcccagagcgtctcagggttactttgcgaaacggattgcctgactttatgagccagagcatgcttaacaattttcgctctttcatcctggaacgctccggtatcctgcccgccacctgctgcgcactgccctccgactttgtgcctctcacctaccgcgagtgccccccgccgctatggagtcactgctacctgttccgtctggccaactatctctcctaccactcggatgtgatcgaggatgtgagcggagacggcttgctggagtgccactgccgctgcaatctgtgcacgccccaccggtccctagcttgcaacccccagttgatgagcgaaacccagataataggcacctttgaattgcaaggccccagcagccaaggcgatgggtcttctcctgggcaaagtttaaaactgaccccgggactgtggacctccgcctacttgcgcaagtttgctccggaagattaccacccctatgaaatcaagttctatgaggaccaatcacagcctccaaaggccgaactttcggcttgcgtcatcacccagggggcaattctggcccaattgcaagccatccaaaaatcccgccaagaatttctactgaaaaagggtaagggggtctaccttgacccccagaccggcgaggaactcaacacaaggttccctcaggatgtcccaacgacgagaaaacaagaagttgaaggtgcagccgccgcccccagaagatatggaggaagattgggacagtcaggcagaggaggcggaggaggacagtctggaggacagtctggaggaagacagtttggaggaggaaaacgaggaggcagaggaggtggaagaagtaaccgccgacaaacagttatcctcggctgcggagacaagcaacagcgctaccatctccgctccgagtcgaggaacccggcggcgtcccagcagtagatgggacgagaccggacgcttcccgaacccaaccagcgcttccaagaccggtaagaaggatcggcagggatacaagtcctggcgggggcataagaatgccatcatctcctgcttgcatgagtgcgggggcaacatatccttcacgcggcgctacttgctattccaccatggggtgaactttccgcgcaatgttttgcattactaccgtcacctccacagcccctactatagccagcaaatcccgacagtctcgacagataaagacagcggcggcgacctccaacagaaaaccagcagcggcagttagaaaatacacaacaagtgcagcaacaggaggattaaagattacagccaacgagccagcgcaaacccgagagttaagaaatcggatctttccaaccctgtatgccatcttccagcagagtcggggtcaagagcaggaactgaaaataaaaaaccgatctctgcgttcgctcaccagaagttgtttgtatcacaagagcgaagatcaacttcagcgcactctcgaggacgccgaggctctcttcaacaagtactgcgcgctgactcttaaagagtaggcagcgaccgcgcttattcaaaaaaggcgggaattacatcatcctcgacatgagtaaagaaattcccacgccttacatgtggagttatcaaccccaaatgggattggcagcaggcgcctcccaggactactccacccgcatgaattggctcagcgccgggccttctatgatttctcgagttaatgatatacgcgcctaccgaaaccaaatacttttggaacagtcagctcttaccaccacgccccgccaacaccttaatcccagaaattggcccgccgccctagtgtaccaggaaagtcccgctcccaccactgtattacttcctcgagacgcccaggccgaagtccaaatgactaatgcaggtgcgcagttagctggcggctccaccctatgtcgtcacaggcctcggcataatataaaacgcctgatgatcagaggccgaggtatccagctcaacgacgagtcggtgagctctccgcttggtctacgaccagacggaatctttcagattgccggctgcgggagatcttccttcacccctcgtcaggctgttctgactttggaaagttcgtcttcgcaaccccgctcgggcggaatcgggaccgttcaatttgtagaggagtttactccctctgtctacttcaaccccttctccggatctcctgggcactacccggacgagttcataccgaacttcgacgcgattagcgagtcagtggacggctacgattgatgtctggtgacgcggctgagctatctcggctgcgacatctagaccactgccgccgctttcgctgctttgcccgggaacttattgagttcatctacttcgaactccccaaggatcaccctcaaggtccggcccacggagtgcggattactatcgaaggcaaaatagactctcgcctgcaacgaattttctcccagcggcccgtgctgatcgagcgagaccagggaaacaccacggttagtaatcaattacggggtcattagttcatagcccatatatggagttaacttgtttattgcagcttataatggttacaaataaagcaatagcatcacaaatttcacaaataaagcatttttttcactgcattctagttgtggtttgtccaaactcatcaatgtatcttatcatgtctgctcgaagcggccggccgccccgactctagagtcgcggcctcattaggaagttcctatactttctagagaataggaacttctcagaagaactcgtcaagaaggcgatagaaggcgatgcgctgcgaatcgggagcggcgataccgtaaagcacgaggaagcggtcagcccattcgccgccaagctcttcagcaatatcacgggtagccaacgctatgtcctgatagcggtccgccacacccagccggccacagtcgatgaatccagaaaagcggccattttccaccatgatattcggcaagcaggcatcgccatgggtcacgacgagatcctcgccgtcgggcatgcgcgccttgagcctggcgaacagttcggctggcgcgagcccctgatgctcttcgtccagatcatcctgatcgacaagaccggcttccatccgagtacgtgctcgctcgatgcgatgtttcgcttggtggtcgaatgggcaggtagccggatcaagcgtatgcagccgccgcattgcatcagccatgatggatactttctcggcaggagcaaggtgagatgacaggagatcctgccccggcacttcgcccaatagcagccagtcccttcccgcttcagtgacaacgtcgagcacagctgcgcaaggaacgcccgtcgtggccagccacgatagccgcgctgcctcgtcctgcagttcattcagggcaccggacaggtcggtcttgacaaaaagaaccgggcgcccctgcgctgacagccggaacacggcggcatcagagcagccgattgcctgttgtgcccagtcatagccgaatagcctctccacccaagcggccggagaacctgcgtgcaatccatcttgttcaatggccgatcccataacaccccttgtattactgtttatgtaagcagacagttttactgttcgtgatgatatatttttatcttgtgcaatgtaacaggttgtggccatagcgggcccgggattttcctccacgtccccgcatgttagaagacttcccctgccctcggctctggaagttcctatactttctagagaataggaacttcccgccagaatgcgttcgcacagccgccagccggtcactccgttgatggttactcggaacagcagggagccgtcggggttgatcaggcgctcgtcgataattttgttgccgttccacagggtccctgttacagtgatctttttgccgtcgaacacggcgatgccttcatacggccgtccgaaatagtcgatcatgttcggcgtaaccccgtcgattaccagtgtgccatagtgcaggatcaccttaaagtgatgatcatccacagggtacaccaccttaaaaattttttcgatctggcccatttggtcgccgctcagaccttcatacgggatgatgacatggatgtcgatcttcagcccattttcaccgctcaggacaatcctttggatcggagttacggacaccccgagattctgaaacaaactggacacacctccctgttcaaggacttggtccaggttgtagccggctgtctgtcgccagtccccaacgaaatcttcgagtgtgaagaccatggatccgggcccggggttttcttcaacgtctccagcctgcttcagcaggctgaagttagtagctccgcttcctcgagctcgagatctggcgaaggcgatgggggtcttgaaggcgtgctggtactccacgatgcccagctcggtgttgctgtgcagctcctccacgcggcggaaggcgaacatggggcccccgttctgcaggatgctggggtggatggcgctcttgaagtgcatgtggctgtccaccacgaagctgtagtagccgccgtcgcgcaggctgaaggtgcgggcgaagctgcccaccagcacgttatcgcccatggggtgcaggtgctccacggtggcgttgctgcggatgatcttgtcggtgaagatcacgctgtcctcggggaagccggtgcccaccaccttgaagtcgccgatcacgcggccggcctcgtagcggtagctgaagctcacgtgcagcacgccgccgtcctcgtacttctcgatgcgggtgttggtgtagccgccgttgttgatggcgtgcaggaaggggttctcgtagccgctggggtaggtgccgaagtggtagaagccgtagcccatcacgtggctcagcaggtaggggctgaaggtcagggcgcctttggtgctcttcatcttgttggtcatgcggccctgctcgggggtgccctctccgccgcccaccagctcgaactccacgccgttcagggtgccggtgatgcggcactcgatcttcatggcgggcatggtggcgaccggtagcgctagcggcttcggtaccacgcgttcgctcgaattaatcaattctttgccaaaatgatgagacagcacaataaccagcacgttgcccaggagctgtaggaaaaagaagaaggcatgaacatggttagcagaggctctagagccgccggtcacacgccagaagccgaaccccgccctgccccgtcccccccgaaggcagccgtccccccgcggacagccccgaggctggagagggagaaggggacggcggcgcggcgacgcacgaaggccctccccgcccatttccttcctgccggggccctcccggagcccctcaaggctttcacgcagccacagaaaagaaacaagccgtcattaaaccaagcgctaattacagcccggaggagaagggccgtcccgcccgctcacctgtgggagtaacgcggtcagtcagagccggggcgggcggcgcgaggcggcgcggagcggggcacggggcgaaggcaacgcagcgactcccgcccgccgcgcgcttcgctttttatagggccgccgccgccgccgcctcgccataaaaggaaactttcggagcgcgccgctctgattggctgccgccgcacctctccgcctcgccccgccccgcccctcgccccgccccgccccgcctggcgcgcgccccccccccccccccgcccccatcgctgcacaaaataattaaaaaataaataaatacaaaattgggggtggggaggggggggagatggggagagtgaagcagaacgtggggctcacctcgaccatggtaatagcgatgactaatacgtagatgtactgccaagtaggaaagtcccataaggtcatgtactgggcataatgccaggcgggccatttaccgtcattgacgtcaatagggggcgtacttggcatatgatacacttgatgtactgccaagtgggcagtttaccgtaaatactccacccattgacgtcaatggaaagtccctattggcgttactatgggaacatacgtcattattgacgtcaatgggcgggggtcgttgggcggtcagccaggcgggccatttaccgtaagttatgtaacgcggaacaacaacaattgcattcattttatgtttcaggttcagggggaggtgtggtcctgcgattccatcgagtgcacctacaccctgctgaagaccctatgcggcctaagagacctgctaccaatgaattaaaaaaaaatgattaataaaaaatcacttacttgaaatcagcaataaggtctctgttgaaattttctcccagcagcacctcacttccctcttcccaactctggtattctaaaccccgttcagcggcatactttctccatactttaaaggggatgtcaaattttagctcctctcctgtacccacaatcttcatgtctttcttcccagatgaccaagagagtccggctcagtgactccttcaaccctgtctacccctatgaagatgaaagcacctcccaacacccctttataaacccagggtttatttccccaaatggcttcacacaaagcccagacggagttcttactttaaaatgtttaaccccactaacaaccacaggcggatctctacagctaaaagtgggagggggacttacagtggatgacactgatggtaccttacaagaaaacatacgtgctacagcacccattactaaaaataatcactctgtagaactatccattggaaatggattagaaactcaaaacaataaactatgtgccaaattgggaaatgggttaaaatttaacaacggtgacatttgtataaaggatagtattaacaccttatggactggaataaaccctccacctaactgtcaaattgtggaaaacactaatacaaatgatggcaaacttactttagtattagtaaaaaatggagggcttgttaatggctacgtgtctctagttggtgtatcagacactgtgaaccaaatgttcacacaaaagacagcaaacatccaattaagattatattttgactcttctggaaatctattaactgaggaatcagacttaaaaattccacttaaaaataaatcttctacagcgaccagtgaaactgtagccagcagcaaagcctttatgccaagtactacagcttatcccttcaacaccactactagggatagtgaaaactacattcatggaatatgttactacatgactagttatgatagaagtctatttcccttgaacatttctataatgctaaacagccgtatgatttcttccaatgttgcctatgccatacaatttgaatggaatctaaatgcaagtgaatctccagaaagcaacatagctacgctgaccacatccccctttttcttttcttacattacagaagacgacaactaaaataaagtttaagtgtttttatttaaaatcacaaaattcgagtagttattttgcctccaccttcccatttgacagaatacacagtcctttctccccggctggccttaaaaagcatcatatcatgggtaacagacatattcttaggtgttatattccacacggtttcctgtcgagccaaacgctcatcagtgatattaataaactccccgggcagctcacttaagttcatgtcgctgtccagctgctgagccacaggctgctgtccaacttgcggttgcttaacgggcggcgaaggagaagtccacgcctacatgggggtagagtcataatcgtgcatcaggatagggcggtggtgctgcagcagcgcgcgaataaactgctgccgccgccgctccgtcctgcaggaatacaacatggcagtggtctcctcagcgatgattcgcaccgcccgcagcataaggcgccttgtcctccgggcacagcagcgcaccctgatctcacttaaatcagcacagtaactgcagcacagcaccacaatattgttcaaaatcccacagtgcaaggcgctgtatccaaagctcatggcggggaccacagaacccacgtggccatcataccacaagcgcaggtagattaagtggcgacccctcataaacacgctggacataaacattacctcttttggcatgttgtaattcaccacctcccggtaccatataaacctctgattaaacatggcgccatccaccaccatcctaaaccagctggccaaaacctgcccgccggctatacactgcagggaaccgggactggaacaatgacagtggagagcccaggactcgtaaccatggatcatcatgctcgtcatgatatcaatgttggcacaacacaggcacacgtgcatacacttcctcaggattacaagctcctcccgcgttagaaccatatcccagggaacaacccattcctgaatcagcgtaaatcccacactgcagggaagacctcgcacgtaactcacgttgtgcattgtcaaagtgttacattcgggcagcagcggatgatcctccagtatggtagcgcgggtttctgtctcaaaaggaggtagacgatccctactgtacggagtgcgccgagacaaccgagatcgtgttggtcgtagtgtcatgccaaatggaacgccggacgtagtcattctcgtattttgtatagcaaaacgcggccctggcagaacacactcttcttcgccttctatcctgccgcttagcgtgttccgtgtgatagttcaagtacagccacactcttaagttggtcaaaagaatgctggcttcagttgtaatcaaaactccatcgcatctaattgttctgaggaaatcatccacggtagcatatgcaaatcccaaccaagcaatgcaactggattgcgtttcaagcaggagaggagagggaagagacggaagaaccatgttaatttttattccaaacgatctcgcagtacttcaaattgtagatcgcgcagatggcatctctcgcccccactgtgttggtgaaaaagcacagctaaatcaaaagaaatgcgattttcaaggtgctcaacggtggcttccaacaaagcctccacgcgcacatccaagaacaaaagaataccaaaagaaggagcattttctaactcctcaatcatcatattacattcctgcaccattcccagataattttcagctttccagccttgaattattcgtgtcagttcttgtggtaaatccaatccacacattacaaacaggtcccggagggcgccctccaccaccattcttaaacacaccctcataatgacaaaatatcttgctcctgtgtcacctgtagcgaattgagaatggcaacatcaattgacatgcccttggctctaagttcttctttaagttctagttgtaaaaactctctcatattatcaccaaactgcttagccagaagccccccgggaacaagagcaggggacgctacagtgcagtacaagcgcagacctccccaattggctccagcaaaaacaagattggaataagcatattgggaaccaccagtaatatcatcgaagttgctggaaatataatcaggcagagtttcttgtagaaattgaataaaagaaaaatttgccaaaaaaacattcaaaacctctgggatgcaaatgcaataggttaccgcgctgcgctccaacattgttagttttgaattagtctgcaaaaataaaaaaaaaacaagcgtcatatcatagtagcctgacgaacaggtggataaatcagtctttccatcacaagacaagccacagggtctccagctcgaccctcgtaaaacctgtcatcgtgattaaacaacagcaccgaaagttcctcgcggtgaccagcatgaataagtcttgatgaagcatacaatccagacatgttagcatcagttaaggagaaaaaacagccaacatagcctttgggtataattatgcttaatcgtaagtatagcaaagccacccctcgcggatacaaagtaaaaggcacaggagaataaaaaatataattatttctctgctgctgtttaggcaacgtcgcccccggtccctctaaatacacatacaaagcctcatcagccatggcttaccagagaaagtacagcgggcacacaaaccacaagctctaaagtcactctccaacctctccacaatatatatacacaagccctaaactgacgtaatgggactaaagtgtaaaaaatcccgccaaacccaacacacaccccgaaactgcgtcaccagggaaaagtacagtttcacttccgcaatcccaacaagcgtcacttcctctttctcacggtacgtcacatcccattaacttacaacgtcattttcccacggccgcgccgccccttttaaccgttaaccccacagccaatcaccacacggcccacactttttaaaatcacctcatttacatattggcaccattccatctataaggtatattattgatgatggccaagctatttaggtgacactatagaatactcaagctatgcatcaagcttggtaccgagctcggatccactagtaacggccgccagtgtgctggaattcgcccttgtttaaacgcgatcgcttgagatcgttttggtctgcgcgtaatctcttgctctgaaaacgaaaaaaccgccttgcagggcggtttttcgaaggttctctgagctaccaactctttgaaccgaggtaactggcttggaggagcgcagtcaccaaaacttgtcctttcagtttagccttaaccggcgcatgacttcaagactaactcctctaaatcaattaccagtggctgctgccagtggtgcttttgcatgtctttccgggttggactcaagacgatagttaccggataaggcgcagcggtcggactgaacggggggttcgtgcatacagtccagcttggagcgaactgcctacccggaactgagtgtcaggcgtggaatgagacaaacgcggccataacagcggaatgacaccggtaaaccgaaaggcaggaacaggagagcgcacgagggagccgccagggggaaacgcctggtatctttatagtcctgtcgggtttcgccaccactgatttgagcgtcagatttcgtgatgcttgtcaggggggcggagcctatggaaaaacggctttgccgcggccctctcacttccctgttaagtatcttcctggcatcttccaggaaatctccgccccgttcgtaagccatttccgctcgccgcagtcgaacgaccgagcgtagcgagtcagtgagcgaggaagcggaatatatcctgtatcacatattctgctgacgcaccggtgcagccttttttctcctgccacatgaagcacttcactgacaccctcatcagtgccaacatagtaagccagtatacactccgctagcgcgatcgcttaattaatttaaatcctgcagggtttaaacggccggcctagggataacagggtaatcgtaactataacggtcctaaggtagcgaatgatgtccggcggtgcttttgccgttacgcaccaccccgtcagtagctgaacaggagggacagctgatagaaacagaagccactggagcacctcaaaaacaccatcatacactaaatcagtaagttggcagcatcacccgacgcactttgcgccgaataaatacctgtgacggaagatcacttcgcagaataaataaatcctggtgtccctgttgataccgggaagccctgggccaacttttggcgaaaatgagacgttgatcggcacgtaagaggttccaactttcaccataatgaaataagatcactaccgggcgtattttttgagttatcgagattttcaggagctaaggaagctaaaatggagaaaaaaatcactggatataccaccgttgatatatcccaatggcatcgtaaagaacattttgaggcatttcagtcagttgctcaatgtacctataaccagaccgttcagctggatattacggcctttttaaagaccgtaaagaaaaataagcacaagttttatccggcctttattcacattcttgcccgcctgatgaatgctcatccggaattccgtatggcaatgaaagacggtgagctggtgatatgggatagtgttcacccttgttacaccgttttccatgagcaaactgaaacgttttcatcgctctggagtgaataccacgacgatttccggcagtttctacacatatattcgcaagatgtggcgtgttacggtgaaaacctggcctatttccctaaagggtttattgagaatatgtttttcgtctcagccaatccctgggtgagtttcaccagttttgatttaaacgtggccaatatggacaacttcttcgcccccgttttcaccatgggcaaatattatacgcaaggcgacaaggtgctgatgccgctggcgattcaggttcatcatgccgtctgtgatggcttccatgtcggcagaatgcttaatgaattacaacagtactgcgatgagtggcagggcggggcgtaacctgcaggttaattaaggaagggcgaattctgcagatatccatcacactggcggccgctcgagcatgcatctagagggcccaattcgccctatagtgagtcgtattacaattcactggcc

SEQ ID NO: 176 - DNA, 34784 bp, Artificial Sequence
  PS2
catcatcaataatataccttatagatggaatggtgccaatatgtaaatgaggtgattttaaaaagtgtgggccgtgtggtgattggctgtggggttaacggttaaaaggggcggcgcggccgtgggaaaatgacgttttatgggggtggagtttttttgcaagttgtcgcgggaaatgataacttcgtatagcatacattatacgaagttattagactttgacccattacgtggaggtttcgattaccgtgttttttacctgaatttccgcgtaccgtgtcaaagtcttctgtttttacgtaggtgtcagctgatcgctagggtatttataacttcgtatagcatacattatacgaagttatggaatgtttatgccttaccagtgtaacatgaatcatgtgaaagtgttgttggaaccagatgccttttccagaatgagcctaacaggaatctttgacatgaacacgcaaatctggaagatcctgaggtatgatgatacgagatcgagggtgcgcgcatgcgaatgcggaggcaagcatgccaggttccagccggtgtgtgtagatgtgaccgaagatctcagaccggatcatttggttattgcccgcactggagcagagttcggatccagtggagaagaaactgactaaggtgagtattgggaaaactttggggtgggattttcagatggacagattgagtaaaaatttgttttttctgtcttgcagctgacatgagtggaaatgcttcttttaaggggggagtcttcagcccttatctgacagggcgtctcccatcctgggcaggagttcgtcagaatgttatgggatctactgtggatggaagacccgttcaacccgccaattcttcaacgctgacctatgctactttaagttcttcacctttggacgcagctgcagccgctgccgccgcctctgtcgccgctaacactgtgcttggaatgggttactatggaagcatcgtggctaattccacttcctctaataacccttctacactgactcaggacaagttacttgtccttttggcccagctggaggctttgacccaacgtctgggtgaactttctcagcaggtggccgagttgcgagtacaaactgagtctgctgtcggcacggcaaagtctaaataaaaaaaattccagaatcaatgaataaataaacgagcttgttgttgatttaaaatcaagtgtttttatttcatttttcgcgcacggtatgccctggaccaccgatctcgatcattgagaactcggtggattttttccagaatcctatagaggtgggattgaatgtttagatacatgggcattaggccgtctttggggtggagatagctccattgaagggattcatgctccggggtagtgttgtaaatcacccagtcataacaaggtcgcagtgcatggtgttgcacaatatcttttagaagtaggctgattgccacagataagcccttggtgtaggtgtttacaaaccggttgagctgggaggggtgcattcgaggtgaaattatgtgcattttggattggatttttaagttggcaatattgccgccaagatcccgtcttgggttcatgttatgaaggactaccaagacggtgtatccggtacatttaggaaatttatcgtgcagcttggatggaaaagcgtggaaaaatttggagacacccttgtgtcctccgagattttccatgcactcatccatgataatagcaatggggccgtgggcagcggcgcgggcaaacacgttccgtgggtctgacacatcatagttatgttcctgagttaaatcatcataagccattttaatgaatttggggcggagcgtaccagattggggtatgaatgttccttcgggccccggagcatagttcccctcacagatttgcatttcccaagctttcagttctgagggtggaatcatgtccacctggggggctatgaagaacaccgtttcgggggcgggggtgattagttgggatgatagcaagtttctgagcaattgagatttgccacatccggtggggccataaataattccgattacaggttgcaggtggtagtttagggaacggcaactgccgtcttctcgaagcaagggggccacctcgttcatcatttcccttacatgcatattttcccgcaccaaatccattaggaggcgctctcctcctagtgatagaagttcttgtagtgaggaaaagtttttcagcggttttagaccgtcagccatgggcattttggaaagagtttgctgcaaaagttctagtctgttccacagttcagtgatgtgttctatggcatctcgatccagcagacctcctcgtttcgcgggtttggacggctcctggagtagggtatgagacgatgggcgtccagcgctgccagggttcggtccttccagggtctcagtgttcgagtcagggttgtttccgtcacagtgaaggggtgtgcgcctgcttgggcgcttgccagggtgcgcttcagactcattctgctggtggagaacttctgtcgcttggcgccctgtatgtcggccaagtagcagtttaccatgagttcgtagttgagcgcctcggctgcgtggcctttggcgcggagcttacctttggaagttttcttgcataccgggcagtataggcatttcagcgcatacagcttgggcgcaaggaaaatggattctggggagtatgcatccgcgccgcaggaggcgcaaacagtttcacattccaccagccaggttaaatccggttcattggggtcaaaaacaagttttccgccatattttttgatgcgtttcttacctttggtctccataagttcgtgtcctcgttgagtgacaaacaggctgtccgtatctccgtagactgattttacaggcctcttctccagtggagtgcctcggtcttcttcgtacaggaactctgaccactctgatacaaaggcgcgcgtccaggccagcacaaaggaggctatgtgggaggggtagcgatcgttgtcaaccagggggtccaccttttccaaagtatgcaaacacatgtcaccctcttcaacatccaggaatgtgattggcttgtaggtgtatttcacgtgacctggggtccccgctgggggggtataaaagggggcggttctttgctcttcctcactgtcttccggatcgctgtccaggaacgtcagctgttggggtaggtattccctctcgaaggcgggcatgacctctgcactcaggttgtcagtttctaagaacgaggaggatttgatattgacagtgccggttgagatgcctttcatgaggttttcgtccatttggtcagaaaacacaatttttttattgtcaagtttggtggcaaatgatccatacagggcgttggataaaagtttggcaatggatcgcatggtttggttcttttccttgtccgcgcgctctttggcggcgatgttgagttggacatactcgcgtgccaggcacttccattcggggaagatagttgttaattcatctggcacgattctcacttgccaccctcgattatgcaaggtaattaaatccacactggtggccacctcgcctcgaaggggttcattggtccaacagagcctacctcctttcctagaacagaaagggggaagtgggtctagcataagttcatcgggagggtctgcatccatggtaaagattcccggaagtaaatccttatcaaaatagctgatgggagtggggtcatctaaggccatttgccattctcgagctgccagtgcgcgctcatatgggttaaggggactgccccagggcatgggatgggtgagagcagaggcatacatgccacagatgtcatagacgtagatgggatcctcaaagatgcctatgtaggttggatagcatcgcccccctctgatacttgctcgcacatagtcatatagttcatgtgatggcgctagcagccccggacccaagttggtgcgattgggtttttctgttctgtagacgatctggcgaaagatggcgtgagaattggaagagatggtgggtctttgaaaaatgttgaaatgggcatgaggtagacctacagagtctctgacaaagtgggcataagattcttgaagcttggttaccagttcggcggtgacaagtacgtctagggcgcagtagtcaagtgtttcttgaatgatgtcataacctggttggtttttcttttcccacagttcgcggttgagaaggtattcttcgcgatccttccagtactcttctagcggaaacccgtctttgtctgcacggtaagatcctagcatgtagaactgattaactgccttgtaagggcagcagcccttctctacgggtagagagtatgcttgagcagcttttcgtagcgaagcgtgagtaagggcaaaggtgtctctgaccatgactttgagaaattggtatttgaagtccatgtcgtcacaggctccctgttcccagagttggaagtctacccgtttcttgtaggcggggttgggcaaagcgaaagtaacatcattgaagagaatcttaccggctctgggcataaaattgcgagtgatgcggaaaggctgtggtacttccgctcgattgttgatcacctgggcagctaggacgatttcgtcgaaaccgttgatgttgtgtcctacgatgtataattctatgaaacgcggcgtgcctctgacgtgaggtagcttactgagctcatcaaaggttaggtctgtggggtcagataaggcgtagtgttcgagagcccattcgtgcaggtgaggatttgcatgtaggaatgatgaccaaagatctaccgccagtgctgtttgtaactggtcccgatactgacgaaaatgccggccaattgccattttttctggagtgacacagtagaaggttctggggtcttgttgccatcgatcccacttgagtttaatggctagatcgtgggccatgttgacgagacgctcttctcctgagagtttcatgaccagcatgaaaggaactagttgtttgccaaaggatcccatccaggtgtaagtttccacatcgtaggtcaggaagagtctttctgtgcgaggatgagagccgatcgggaagaactggatttcctgccaccagttggaggattggctgttgatgtgatggaagtagaagtttctgcggcgcgccgagcattcgtgtttgtgcttgtacagacggccgcagtagtcgcagcgttgcacgggttgtatctcgtgaatgagctgtacctggcttcccttgacgagaaatttcagtgggaagccgaggcctggcgattgtatctcgtgctcttctatattcgctgtatcggcctgttcatcttctgtttcgatggtggtcatgctgacgagcccccgcgggaggcaagtccagacctcggcgcgggaggggcggagctgaaggacgagagcgcgcaggctggagctgtccagagtcctgagacgctgcggactcaggttagtaggtagggacagaagattaacttgcatgatcttttccagggcgtgcgggaggttcagatggtacttgatttccacaggttcgtttgtagagacgtcaatggcttgcagggttccgtgtcctttgggcgccactaccgtacctttgttttttcttttgatcggtggtggctctcttgcttcttgcatgctcagaagcggtgacggggacgcgcgccgggcggcagcggttgttccggacccgggggcatggctggtagtggcacgtcggcgccgcgcacgggcaggttctggtattgcgctctgagaagacttgcgtgcgccaccacgcgtcgattgacgtcttgtatctgacgtctctgggtgaaagctaccggccccgtgagcttgaacctgaaagagagttcaacagaatcaatttcggtatcgttaacggcagcttgtctcagtatttcttgtacgtcaccagagttgtcctggtaggcgatctccgccatgaactgctcgatttcttcctcctgaagatctccgcgacccgctctttcgacggtggccgcgaggtcattggagatacggcccatgagttgggagaatgcattcatgcccgcctcgttccagacgcggctgtaaaccacggccccctcggagtctcttgcgcgcatcaccacctgagcgaggttaagctccacgtgtctggtgaagaccgcatagttgcataggcgctgaaaaaggtagttgagtgtggtggcaatgtgttcggcgacgaagaaatacatgatccatcgtctcagcggcatttcgctaacatcgcccagagcttccaagcgctccatggcctcgtagaagtccacggcaaaattaaaaaactgggagtttcgcgcggacacggtcaattcctcctcgagaagacggatgagttcggctatggtggcccgtacttcgcgttcgaaggctcccgggatctcttcttcctcttctatctcttcttccactaacatctcttcttcgtcttcaggcgggggcggagggggcacgcggcgacgtcgacggcgcacgggcaaacggtcgatgaatcgttcaatgacctctccgcggcggcggcgcatggtttcagtgacggcgcggccgttctcgcgcggtcgcagagtaaaaacaccgccgcgcatctccttaaagtggtgactgggaggttctccgtttgggagggagagggcgctgattatacattttattaattggcccgtagggactgcgcgcagagatctgatcgtgtcaagatccacgggatctgaaaacctttcgacgaaagcgtctaaccagtcacagtcacaaggtaggctgagtacggcttcttgtgggcgggggtggttatgtgttcggtctgggtcttctgtttcttcttcatctcgggaaggtgagacgatgctgctggtgatgaaattaaagtaggcagttctaagacggcggatggtggcgaggagcaccaggtctttgggtccggcttgctggatacgcaggcgattggccattccccaagcattatcctgacatctagcaagatctttgtagtagtcttgcatgagccgttctacgggcacttcttcctcacccgttctgccatgcatacgtgtgagtccaaatccgcgcattggttgtaccagtgccaagtcagctacgactctttcggcgaggatggcttgctgtacttgggtaagggtggcttgaaagtcatcaaaatccacaaagcggtggtaagcccctgtattaatggtgtaagcacagttggccatgactgaccagttaactgtctggtgaccagggcgcacgagctcggtgtatttaaggcgcgaataggcgcgggtgtcaaagatgtaatcgttgcaggtgcgcaccagatactggtaccctataagaaaatgcggcggtggttggcggtagagaggccatcgttctgtagctggagcgccaggggcgaggtcttccaacataaggcggtgatagccgtagatgtacctggacatccaggtgattcctgcggcggtagtagaagcccgaggaaactcgcgtacgcggttccaaatgttgcgtagcggcatgaagtagttcattgtaggcacggtttgaccagtgaggcgcgcgcagtcattgatgctctatagacacggagaaaatgaaagcgttcagcgactcgactccgtagcctggaggaacgtgaacgggttgggtcgcggtgtaccccggttcgagacttgtactcgagccggccggagccgcggctaacgtggtattggcactcccgtctcgacccagcctacaaaaatccaggatacggaatcgagtcgttttgctggtttccgaatggcagggaagtgagtcctattttttttttttttgccgctcagatgcatcccgtgctgcgacagatgcgcccccaacaacagcccccctcgcagcagcagcagcagcaaccacaaaaggctgtccctgcaactactgcaactgccgccgtgagcggtgcgggacagcccgcctatgatctggacttggaagagggcgaaggactggcacgtctaggtgcgccttcgcccgagcggcatccgcgagttcaactgaaaaaagattctcgcgaggcgtatgtgccccaacagaacctatttagagacagaagcggcgaggagccggaggagatgcgagcttcccgctttaacgcgggtcgtgagctgcgtcacggtttggaccgaagacgagtgttgcgagacgaggatttcgaagttgatgaagtgacagggatcagtcctgccagggcacacgtggctgcagccaaccttgtatcggcttacgagcagacagtaaaggaagagcgtaacttccaaaagtcttttaataatcatgtgcgaaccctgattgcccgcgaagaagttacccttggtttgatgcatttgtgggatttgatggaagctatcattcagaaccctactagcaaacctctgaccgcccagctgtttctggtggtgcaacacagcagagacaatgaggctttcagagaggcgctgctgaacatcaccgaacccgaggggagatggttgtatgatcttatcaacattctacagagtatcatagtgcaggagcggagcctgggcctggccgagaaggtagctgccatcaattactcggttttgagcttgggaaaatattacgctcgcaaaatctacaagactccatacgttcccatagacaaggaggtgaagatagatgggttctacatgcgcatgacgctcaaggtcttgaccctgagcgatgatcttggggtgtatcgcaatgacagaatgcatcgcgcggttagcgccagcaggaggcgcgagttaagcgacagggaactgatgcacagtttgcaaagagctctgactggagctggaaccgagggtgagaattacttcgacatgggagctgacttgcagtggcagcctagtcgcagggctctgagcgccgcgacggcaggatgtgagcttccttacatagaagaggcggatgaaggcgaggaggaagagggcgagtacttggaagactgatggcacaacccgtgttttttgctagatggaacagcaagcaccggatcccgcaatgcgggcggcgctgcagagccagccgtccggcattaactcctcggacgattggacccaggccatgcaacgtatcatggcgttgacgactcgcaaccccgaagcctttagacagcaaccccaggccaaccgtctatcggccatcatggaagctgtagtgccttcccgatctaatcccactcatgagaaggtcctggccatcgtgaacgcgttggtggagaacaaagctattcgtccagatgaggccggactggtatacaacgctctcttagaacgcgtggctcgctacaacagtagcaatgtgcaaaccaatttggaccgtatgataacagatgtacgcgaagccgtgtctcagcgcgaaaggttccagcgtgatgccaacctgggttcgctggtggcgttaaatgctttcttgagtactcagcctgctaatgtgccgcgtggtcaacaggattatactaactttttaagtgctttgagactgatggtatcagaagtacctcagagcgaagtgtatcagtccggtcctgattacttctttcagactagcagacagggcttgcagacggtaaatctgagccaagcttttaaaaaccttaaaggtttgtggggagtgcatgccccggtaggagaaagagcaaccgtgtctagcttgttaactccgaactcccgcctgttattactgttggtagctcctttcaccgacagcggtagcatcgaccgtaattcctatttgggttacctactaaacctgtatcgcgaagccatagggcaaagtcaggtggacgagcagacctatcaagaaattacccaagtcagtcgcgctttgggacaggaagacactggcagtttggaagccactctgaacttcttgcttaccaatcggtctcaaaagatccctcctcaatatgctcttactgcggaggaggagaggatccttagatatgtgcagcagagcgtgggattgtttctgatgcaagagggggcaactccgactgcagcactggacatgacagcgcgaaatatggagcccagcatgtatgccagtaaccgacctttcattaacaaactgctggactacttgcacagagctgccgctatgaactctgattatttcaccaatgccatcttaaacccgcactggctgcccccacctggtttctacacgggcgaatatgacatgcccgaccctaatgacggatttctgtgggacgacgtggacagcgatgttttttcacctctttctgatcatcgcacgtggaaaaaggaaggcggtgatagaatgcattcttctgcatcgctgtccggggtcatgggtgctaccgcggctgagcccgagtctgcaagtccttttcctagtctacccttttctctacacagtgtacgtagcagcgaagtgggtagaataagtcgcccgagtttaatgggcgaagaggagtacctaaacgattccttgctcagaccggcaagagaaaaaaatttcccaaacaatggaatagaaagtttggtggataaaatgagtagatggaagacttatgctcaggatcacagagacgagcctgggatcatggggactacaagtagagcgagccgtagacgccagcgccatgacagacagaggggtcttgtgtgggacgatgaggattcggccgatgatagcagcgtgttggacttgggtgggagaggaaggggcaacccgtttgctcatttgcgccctcgcttgggtggtatgttgtgaaaaaaaataaaaaagaaaaactcaccaaggccatggcgacgagcgtacgttcgttcttctttattatctgtgtctagtataatgaggcgagtcgtgctaggcggagcggtggtgtatccggagggtcctcctccttcgtacgagagcgtgatgcagcagcagcaggcgacggcggtgatgcaatccccactggaggctccctttgtgcctccgcgatacctggcacctacggagggcagaaacagcattcgttactcggaactggcacctcagtacgataccaccaggttgtatctggtggacaacaagtcggcggacattgcttctctgaactatcagaatgaccacagcaacttcttgaccacggtggtgcagaacaatgactttacccctacggaagccagcacccagaccattaactttgatgaacgatcgcggtggggcggtcagctaaagaccatcatgcatactaacatgccaaacgtgaacgagtatatgtttagtaacaagttcaaagcgcgtgtgatggtgtccagaaaacctcccgacggtgctgcagttggggatacttatgatcacaagcaggatattttggaatatgagtggttcgagtttactttgccagaaggcaacttttcagttactatgactattgatttgatgaacaatgccatcatagataattacttgaaagtgggtagacagaatggagtgcttgaaagtgacattggtgttaagttcgacaccaggaacttcaagctgggatgggatcccgaaaccaagttgatcatgcctggagtgtatacgtatgaagccttccatcctgacattgtcttactgcctggctgcggagtggattttaccgagagtcgtttgagcaaccttcttggtatcagaaaaaaacagccatttcaagagggttttaagattttgtatgaagatttagaaggtggtaatattccggccctcttggatgtagatgcctatgagaacagtaagaaagaacaaaaagccaaaatagaagctgctacagctgctgcagaagctaaggcaaacatagttgccagcgactctacaagggttgctaacgctggagaggtcagaggagacaattttgcgccaacacctgttccgactgcagaatcattattggccgatgtgtctgaaggaacggacgtgaaactcactattcaacctgtagaaaaagatagtaagaatagaagctataatgtgttggaagacaaaatcaacacagcctatcgcagttggtatctttcgtacaattatggcgatcccgaaaaaggagtgcgttcctggacattgctcaccacctcagatgtcacctgcggagcagagcaggtttactggtcgcttccagacatgatgaaggatcctgtcactttccgctccactagacaagtcagtaactaccctgtggtgggtgcagagcttatgcccgtcttctcaaagagcttctacaacgaacaagctgtgtactcccagcagctccgccagtccacctcgcttacgcacgtcttcaaccgctttcctgagaaccagattttaatccgtccgccggcgcccaccattaccaccgtcagtgaaaacgttcctgctctcacagatcacgggaccctgccgttgcgcagcagtatccggggagtccaacgtgtgaccgttactgacgccagacgccgcacctgtccctacgtgtacaaggcactgggcatagtcgcaccgcgcgtcctttcaagccgcactttctaaaaaaaaaatgtccattcttatctcgcccagtaataacaccggttggggtctgcgcgctccaagcaagatgtacggaggcgcacgcaaacgttctacccaacatcccgtgcgtgttcgcggacattttcgcgctccatggggtgccctcaagggccgcactcgcgttcgaaccaccgtcgatgatgtaatcgatcaggtggttgccgacgcccgtaattatactcctactgcgcctacatctactgtggatgcagttattgacagtgtagtggctgacgctcgcaactatgctcgacgtaagagccggcgaaggcgcattgccagacgccaccgagctaccactgccatgcgagccgcaagagctctgctacgaagagctagacgcgtggggcgaagagccatgcttagggcggccagacgtgcagcttcgggcgccagcgccggcaggtcccgcaggcaagcagccgctgtcgcagcggcgactattgccgacatggcccaatcgcgaagaggcaatgtatactgggtgcgtgacgctgccaccggtcaacgtgtacccgtgcgcacccgtccccctcgcacttagaagatactgagcagtctccgatgttgtgtcccagcggcgaggatgtccaagcgcaaatacaaggaagaaatgctgcaggttatcgcacctgaagtctacggccaaccgttgaaggatgaaaaaaaaccccgcaaaatcaagcgggttaaaaaggacaaaaaagaagaggaagatggcgatgatgggctggcggagtttgtgcgcgagtttgccccacggcgacgcgtgcaatggcgtgggcgcaaagttcgacatgtgttgagacctggaacttcggtggtctttacacccggcgagcgttcaagcgctacttttaagcgttcctatgatgaggtgtacggggatgatgatattcttgagcaggcggctgaccgattaggcgagtttgcttatggcaagcgtagtagaataacttccaaggatgagacagtgtcaatacccttggatcatggaaatcccacccctagtcttaaaccggtcactttgcagcaagtgttacccgtaactccgcgaacaggtgttaaacgcgaaggtgaagatttgtatcccactatgcaactgatggtacccaaacgccagaagttggaggacgttttggagaaagtaaaagtggatccagatattcaacctgaggttaaagtgagacccattaagcaggtagcgcctggtctgggggtacaaactgtagacattaagattcccactgaaagtatggaagtgcaaactgaacccgcaaagcctactgccacctccactgaagtgcaaacggatccatggatgcccatgcctattacaactgacgccgccggtcccactcgaagatcccgacgaaagtacggtccagcaagtctgttgatgcccaattatgttgtacacccatctattattcctactcctggttaccgaggcactcgctactatcgcagccgaaacagtacctcccgccgtcgccgcaagacacctgcaaatcgcagtcgtcgccgtagacgcacaagcaaaccgactcccggcgccctggtgcggcaagtgtaccgcaatggtagtgcggaacctttgacactgccgcgtgcgcgttaccatccgagtatcatcacttaatcaatgttgccgctgcctccttgcagatatggccctcacttgtcgccttcgcgttcccatcactggttaccgaggaagaaactcgcgccgtagaagagggatgttgggacgcggaatgcgacgctacaggcgacggcgtgctatccgcaagcaattgcggggtggttttttaccagccttaattccaattatcgctgctgcaattggcgcgataccaggcatagcttccgtggcggttcaggcctcgcaacgacattgacattggaaaaaaaacgtataaataaaaaaaaatacaatggactctgacactcctggtcctgtgactatgttttcttagagatggaagacatcaatttttcatccttggctccgcgacacggcacgaagccgtacatgggcacctggagcgacatcggcacgagccaactgaacgggggcgccttcaattggagcagtatctggagcgggcttaaaaattttggctcaaccataaaaacatacgggaacaaagcttggaacagcagtacaggacaggcgcttagaaataaacttaaagaccagaacttccaacaaaaagtagtcgatgggatagcttccggcatcaatggagtggtagatttggctaaccaggctgtgcagaaaaagataaacagtcgtttggacccgccgccagcaaccccaggtgaaatgcaagtggaggaagaaattcctccgccagaaaaacgaggcgacaagcgtccgcgtcccgatttggaagagacgctggtgacgcgcgtagatgaaccgccttcttatgaggaagcaacgaagcttggaatgcccaccactagaccgatagccccaatggccaccggggtgatgaaaccttctcagttgcatcgacccgtcaccttggatttgccccctccccctgctgctactgctgtacccgcttctaagcctgtcgctgccccgaaaccagtcgccgtagccaggtcacgtcccgggggcgctcctcgtccaaatgcgcactggcaaaatactctgaacagcatcgtgggtctaggcgtgcaaagtgtaaaacgccgtcgctgcttttaattaaatatggagtagcgcttaacttgcctatctgtgtatatgtgtcattacacgccgtcacagcagcagaggaaaaaaggaagaggtcgtgcgtcgacgctgagttactttcaagatggccaccccatcgatgctgccccaatgggcatacatgcacatcgccggacaggatgcttcggagtacctgagtccgggtctggtgcagttcgcccgcgccacagacacctacttcaatctgggaaataagtttagaaatcccaccgtagcgccgacccacgatgtgaccaccgaccgtagccagcggctcatgttgcgcttcgtgcccgttgaccgggaggacaatacatactcttacaaagtgcggtacaccctggccgtgggcgacaacagagtgctggatatggccagcacgttctttgacattaggggcgtgttggacagaggtcccagtttcaaaccctattctggtacggcttacaactctctggctcctaaaggcgctccaaatgcatctcaatggattgcaaaaggcgtaccaactgcagcagccgcaggcaatggtgaagaagaacatgaaacagaggagaaaactgctacttacacttttgccaatgctcctgtaaaagccgaggctcaaattacaaaagagggcttaccaataggtttggagatttcagctgaaaacgaatctaaacccatctatgcagataaactttatcagccagaacctcaagtgggagatgaaacttggactgacctagacggaaaaaccgaagagtatggaggcagggctctaaagcctactactaacatgaaaccctgttacgggtcctatgcgaagcctactaatttaaaaggtggtcaggcaaaaccgaaaaactcggaaccgtcgagtgaaaaaattgaatatgatattgacatggaattttttgataactcatcgcaaagaacaaacttcagtcctaaaattgtcatgtatgcagaaaatgtaggtttggaaacgccagacactcatgtagtgtacaaacctggaacagaagacacaagttccgaagctaatttgggacaacagtctatgcccaacagacccaactacattggcttcagagataactttattggactcatgtactataacagtactggtaacatgggggtgctggctggtcaagcgtctcagttaaatgcagtggttgacttgcaggacagaaacacagaactttcttaccaactcttgcttgactctctgggcgacagaaccagatactttagcatgtggaatcaggctgtggacagttatgatcctgatgtacgtgttattgaaaatcatggtgtggaagatgaacttcccaactattgttttccactggacggcataggtgttccaacaaccagttacaaatcaatagttccaaatggagaagataataataattggaaagaacctgaagtaaatggaacaagtgagatcggacagggtaatttgtttgccatggaaattaaccttcaagccaatctatggcgaagtttcctttattccaatgtggctctgtatctcccagactcgtacaaatacaccccgtccaatgtcactcttccagaaaacaaaaacacctacgactacatgaacgggcgggtggtgccgccatctctagtagacacctatgtgaacattggtgccaggtggtctctggatgccatggacaatgtcaacccattcaaccaccaccgtaacgctggcttgcgttaccgatctatgcttctgggtaacggacgttatgtgcctttccacatacaagtgcctcaaaaattcttcgctgttaaaaacctgctgcttctcccaggctcctacacttatgagtggaactttaggaaggatgtgaacatggttctacagagttccctcggtaacgacctgcgggtagatggcgccagcatcagtttcacgagcatcaacctctatgctacttttttccccatggctcacaacaccgcttccacccttgaagccatgctgcggaatgacaccaatgatcagtcattcaacgactacctatctgcagctaacatgctctaccccattcctgccaatgcaaccaatattcccatttccattccttctcgcaactgggcggctttcagaggctggtcatttaccagactgaaaaccaaagaaactccctctttggggtctggatttgacccctactttgtctattctggttctattccctacctggatggtaccttctacctgaaccacacttttaagaaggtttccatcatgtttgactcttcagtgagctggcctggaaatgacaggttactatctcctaacgaatttgaaataaagcgcactgtggatggcgaaggctacaacgtagcccaatgcaacatgaccaaagactggttcttggtacagatgctcgccaactacaacatcggctatcagggcttctacattccagaaggatacaaagatcgcatgtattcatttttcagaaacttccagcccatgagcaggcaggtggttgatgaggtcaattacaaagacttcaaggccgtcgccataccctaccaacacaacaactctggctttgtgggttacatggctccgaccatgcgccaaggtcaaccctatcccgctaactatccctatccactcattggaacaactgccgtaaatagtgttacgcagaaaaagttcttgtgtgacagaaccatgtggcgcataccgttctcgagcaacttcatgtctatgggggcccttacagacttgggacagaatatgctctatgccaactcagctcatgctctggacatgacctttgaggtggatcccatggatgagcccaccctgctttatcttctcttcgaagttttcgacgtggtcagagtgcatcagccacaccgcggcatcatcgaggcagtctacctgcgtacaccgttctcggccggtaacgctaccacgtaagaagcttcttgcttcttgcaaatagcagctgcaaccatggcctgcggatcccaaaacggctccagcgagcaagagctcagagccattgtccaagacctgggttgcggaccctattttttgggaacctacgataagcgcttcccggggttcatggcccccgataagctcgcctgtgccattgtaaatacggccggacgtgagacggggggagagcactggttggctttcggttggaacccacgttctaacacctgctacctttttgatccttttggattctcggatgatcgtctcaaacagatttaccagtttgaatatgagggtctcctgcgccgcagcgctcttgctaccaaggaccgctgtattacgctggaaaaatctacccagaccgtgcagggcccccgttctgccgcctgcggacttttctgctgcatgttccttcacgcctttgtgcactggcctgaccgtcccatggacggaaaccccaccatgaaattgctaactggagtgccaaacaacatgcttcattctcctaaagtccagcccaccctgtgtgacaatcaaaaagcactctaccattttcttaatacccattcgccttattttcgctctcatcgtacacacatcgaaagggccactgcgttcgaccgtatggatgttcaataatgactcatgtaaacaacgtgttcaataaacatcactttatttttttacatgtatcaaggctctggattacttatttatttacaagtcgaatgggttctgacgagaatcagaatgacccgcaggcagtgatacgttgcggaactgatacttgggttgccacttgaattcgggaatcaccaacttgggaaccggtatatcgggcaggatgtcactccacagctttctggtcagctgcaaagctccaagcaggtcaggagccgaaatcttgaaatcacaattaggaccagtgctctgagcgcgagagttgcggtacaccggattgcagcactgaaacaccatcagcgacggatgtctcacgcttgccagcacggtgggatctgcaatcatgcccacatccagatcttcagcattggcaatgctgaacggggtcatcttgcaggtctgcctacccatggcgggcacccaattaggcttgtggttgcaatcgcagtgcagggggatcagtatcatcttggcctgatcctgtctgattcctggatacacggctctcatgaaagcatcatattgcttgaaagcctgctgggctttactaccctcggtataaaacatcccgcaggacctgctcgaaaactggttagctgcacagccggcatcattcacacagcagcgggcgtcattgttggctatttgcaccacacttctgccccagcggttttgggtgattttggttcgctcgggattctcctttaaggctcgttgtccgttctcgctggccacatccatctcgataatctgctccttctgaatcataatattgccatgcaggcacttcagcttgccctcataatcattgcagccatgaggccacaacgcacagcctgtacattcccaattatggtgggcgatctgagaaaaagaatgtatcattccctgcagaaatcttcccatcatcgtgctcagtgtcttgtgactagtgaaagttaactggatgcctcggtgctcttcgtttacgtactggtgacagatgcgcttgtattgttcgtgttgctcaggcattagtttaaaacaggttctaagttcgttatccagcctgtacttctccatcagcagacacatcacttccatgcctttctcccaagcagacaccaggggcaagctaatcggattcttaacagtgcaggcagcagctcctttagccagagggtcatctttagcgatcttctcaatgcttcttttgccatccttctcaacgatgcgcacgggcgggtagctgaaacccactgctacaagttgcgcctcttctctttcttcttcgctgtcttgactgatgtcttgcatggggatatgtttggtcttccttggcttctttttggggggtatcggaggaggaggactgtcgctccgttccggagacagggaggattgtgacgtttcgctcaccattaccaactgactgtcggtagaagaacctgaccccacacggcgacaggtgtttttcttcgggggcagaggtggaggcgattgcgaagggctgcggtccgacctggaaggcggatgactggcagaaccccttccgcgttcgggggtgtgctccctgtggcggtcgcttaactgatttccttcgcggctggccattgtgttctcctaggcagagaaacaacagacatggaaactcagccattgctgtcaacatcgccacgagtgccatcacatctcgtcctcagcgacgaggaaaaggagcagagcttaagcattccaccgcccagtcctgccaccacctctaccctagaagataaggaggtcgacgcatctcatgacatgcagaataaaaaagcgaaagagtctgagacagacatcgagcaagacccgggctatgtgacaccggtggaacacgaggaagagttgaaacgctttctagagagagaggatgaaaactgcccaaaacagcgagcagataactatcaccaagatgctggaaatagggatcagaacaccgactacctcatagggcttgacggggaagacgcgctccttaaacatctagcaagacagtcgctcatagtcaaggatgcattattggacagaactgaagtgcccatcagtgtggaagagctcagctgcgcctacgagcttaaccttttttcacctcgtactccccccaaacgtcagccaaacggcacctgcgagccaaatcctcgcttaaacttttatccagcttttgctgtgccagaagtactggctacctatcacatcttttttaaaaatcaaaaaattccagtctcctgccgcgctaatcgcacccgcgccgatgccctactcaatctgggacctggttcacgcttacctgatatagcttccttggaagaggttccaaagatcttcgagggtctgggcaataatgagactcgggccgcaaatgctctgcaaaagggagaaaatggcatggatgagcatcacagcgttctggtggaattggaaggcgataatgccagactcgcagtactcaagcgaagcgtcgaggtcacacacttcgcatatcccgctgtcaacctgccccctaaagtcatgacggcggtcatggaccagttactcattaagcgcgcaagtcccctttcagaagacatgcatgacccagatgcctgtgatgagggtaaaccagtggtcagtgatgagcagctaacccgatggctgggcaccgactctccccgggatttggaagagcgtcgcaagcttatgatggccgtggtgctggttaccgtagaactagagtgtctccgacgtttctttaccgattcagaaaccttgcgcaaactcgaagagaatctgcactacacttttagacacggctttgtgcggcaggcatgcaagatatctaacgtggaactcaccaacctggtttcctacatgggtattctgcatgagaatcgcctaggacaaagcgtgctgcacagcacccttaagggggaagcccgccgtgattacatccgcgattgtgtctatctctacctgtgccacacgtggcaaaccggcatgggtgtatggcagcaatgtttagaagaacagaacttgaaagagcttgacaagctcttacagaaatctcttaaggttctgtggacagggttcgacgagcgcaccgtcgcttccgacctggcagacctcatcttcccagagcgtctcagggttactttgcgaaacggattgcctgactttatgagccagagcatgcttaacaattttcgctctttcatcctggaacgctccggtatcctgcccgccacctgctgcgcactgccctccgactttgtgcctctcacctaccgcgagtgccccccgccgctatggagtcactgctacctgttccgtctggccaactatctctcctaccactcggatgtgatcgaggatgtgagcggagacggcttgctggagtgccactgccgctgcaatctgtgcacgccccaccggtccctagcttgcaacccccagttgatgagcgaaacccagataataggcacctttgaattgcaaggccccagcagccaaggcgatgggtcttctcctgggcaaagtttaaaactgaccccgggactgtggacctccgcctacttgcgcaagtttgctccggaagattaccacccctatgaaatcaagttctatgaggaccaatcacagcctccaaaggccgaactttcggcttgcgtcatcacccagggggcaattctggcccaattgcaagccatccaaaaatcccgccaagaatttctactgaaaaagggtaagggggtctaccttgacccccagaccggcgaggaactcaacacaaggttccctcaggatgtcccaacgacgagaaaacaagaagttgaaggtgcagccgccgcccccagaagatatggaggaagattgggacagtcaggcagaggaggcggaggaggacagtctggaggacagtctggaggaagacagtttggaggaggaaaacgaggaggcagaggaggtggaagaagtaaccgccgacaaacagttatcctcggctgcggagacaagcaacagcgctaccatctccgctccgagtcgaggaacccggcggcgtcccagcagtagatgggacgagaccggacgcttcccgaacccaaccagcgcttccaagaccggtaagaaggatcggcagggatacaagtcctggcgggggcataagaatgccatcatctcctgcttgcatgagtgcgggggcaacatatccttcacgcggcgctacttgctattccaccatggggtgaactttccgcgcaatgttttgcattactaccgtcacctccacagcccctactatagccagcaaatcccgacagtctcgacagataaagacagcggcggcgacctccaacagaaaaccagcagcggcagttagaaaatacacaacaagtgcagcaacaggaggattaaagattacagccaacgagccagcgcaaacccgagagttaagaaatcggatctttccaaccctgtatgccatcttccagcagagtcggggtcaagagcaggaactgaaaataaaaaaccgatctctgcgttcgctcaccagaagttgtttgtatcacaagagcgaagatcaacttcagcgcactctcgaggacgccgaggctctcttcaacaagtactgcgcgctgactcttaaagagtaggcagcgaccgcgcttattcaaaaaaggcgggaattacatcatcctcgacatgagtaaagaaattcccacgccttacatgtggagttatcaaccccaaatgggattggcagcaggcgcctcccaggactactccacccgcatgaattggctcagcgccgggccttctatgatttctcgagttaatgatatacgcgcctaccgaaaccaaatacttttggaacagtcagctcttaccaccacgccccgccaacaccttaatcccagaaattggcccgccgccctagtgtaccaggaaagtcccgctcccaccactgtattacttcctcgagacgcccaggccgaagtccaaatgactaatgcaggtgcgcagttagctggcggctccaccctatgtcgtcacaggcctcggcataatataaaacgcctgatgatcagaggccgaggtatccagctcaacgacgagtcggtgagctctccgcttggtctacgaccagacggaatctttcagattgccggctgcgggagatcttccttcacccctcgtcaggctgttctgactttggaaagttcgtcttcgcaaccccgctcgggcggaatcgggaccgttcaatttgtagaggagtttactccctctgtctacttcaaccccttctccggatctcctgggcactacccggacgagttcataccgaacttcgacgcgattagcgagtcagtggacggctacgattgatgtctggtgacgcggctgagctatctcggctgcgacatctagaccactgccgccgctttcgctgctttgcccgggaacttattgagttcatctacttcgaactccccaaggatcaccctcaaggtccggcccacggagtgcggattactatcgaaggcaaaatagactctcgcctgcaacgaattttctcccagcggcccgtgctgatcgagcgagaccagggaaacaccacggttagtaatcaattacggggtcattagttcatagcccatatatggagttaacttgtttattgcagcttataatggttacaaataaagcaatagcatcacaaatttcacaaataaagcatttttttcactgcattctagttgtggtttgtccaaactcatcaatgtatcttatcatgtctgctcgaagcggccggccgccccgactctagagtcgcggcctcattaggaagttcctatactttctagagaataggaacttctcagaagaactcgtcaagaaggcgatagaaggcgatgcgctgcgaatcgggagcggcgataccgtaaagcacgaggaagcggtcagcccattcgccgccaagctcttcagcaatatcacgggtagccaacgctatgtcctgatagcggtccgccacacccagccggccacagtcgatgaatccagaaaagcggccattttccaccatgatattcggcaagcaggcatcgccatgggtcacgacgagatcctcgccgtcgggcatgcgcgccttgagcctggcgaacagttcggctggcgcgagcccctgatgctcttcgtccagatcatcctgatcgacaagaccggcttccatccgagtacgtgctcgctcgatgcgatgtttcgcttggtggtcgaatgggcaggtagccggatcaagcgtatgcagccgccgcattgcatcagccatgatggatactttctcggcaggagcaaggtgagatgacaggagatcctgccccggcacttcgcccaatagcagccagtcccttcccgcttcagtgacaacgtcgagcacagctgcgcaaggaacgcccgtcgtggccagccacgatagccgcgctgcctcgtcctgcagttcattcagggcaccggacaggtcggtcttgacaaaaagaaccgggcgcccctgcgctgacagccggaacacggcggcatcagagcagccgattgcctgttgtgcccagtcatagccgaatagcctctccacccaagcggccggagaacctgcgtgcaatccatcttgttcaatggccgatcccataacaccccttgtattactgtttatgtaagcagacagttttactgttcgtgatgatatatttttatcttgtgcaatgtaacaggttgtggccatagcgggcccgggattttcctccacgtccccgcatgttagaagacttcccctgccctcggctctggaagttcctatactttctagagaataggaacttcccgccagaatgcgttcgcacagccgccagccggtcactccgttgatggttactcggaacagcagggagccgtcggggttgatcaggcgctcgtcgataattttgttgccgttccacagggtccctgttacagtgatctttttgccgtcgaacacggcgatgccttcatacggccgtccgaaatagtcgatcatgttcggcgtaaccccgtcgattaccagtgtgccatagtgcaggatcaccttaaagtgatgatcatccacagggtacaccaccttaaaaattttttcgatctggcccatttggtcgccgctcagaccttcatacgggatgatgacatggatgtcgatcttcagcccattttcaccgctcaggacaatcctttggatcggagttacggacaccccgagattctgaaacaaactggacacacctccctgttcaaggacttggtccaggttgtagccggctgtctgtcgccagtccccaacgaaatcttcgagtgtgaagaccatggatccgggcccggggttttcttcaacgtctccagcctgcttcagcaggctgaagttagtagctccgcttcctcgagctcgagatctggcgaaggcgatgggggtcttgaaggcgtgctggtactccacgatgcccagctcggtgttgctgtgcagctcctccacgcggcggaaggcgaacatggggcccccgttctgcaggatgctggggtggatggcgctcttgaagtgcatgtggctgtccaccacgaagctgtagtagccgccgtcgcgcaggctgaaggtgcgggcgaagctgcccaccagcacgttatcgcccatggggtgcaggtgctccacggtggcgttgctgcggatgatcttgtcggtgaagatcacgctgtcctcggggaagccggtgcccaccaccttgaagtcgccgatcacgcggccggcctcgtagcggtagctgaagctcacgtgcagcacgccgccgtcctcgtacttctcgatgcgggtgttggtgtagccgccgttgttgatggcgtgcaggaaggggttctcgtagccgctggggtaggtgccgaagtggtagaagccgtagcccatcacgtggctcagcaggtaggggctgaaggtcagggcgcctttggtgctcttcatcttgttggtcatgcggccctgctcgggggtgccctctccgccgcccaccagctcgaactccacgccgttcagggtgccggtgatgcggcactcgatcttcatggcgggcatggtggcgaccggtagcgctagcggcttcggtaccacgcgttcgctcgaattaatcaattctttgccaaaatgatgagacagcacaataaccagcacgttgcccaggagctgtaggaaaaagaagaaggcatgaacatggttagcagaggctctagagccgccggtcacacgccagaagccgaaccccgccctgccccgtcccccccgaaggcagccgtccccccgcggacagccccgaggctggagagggagaaggggacggcggcgcggcgacgcacgaaggccctccccgcccatttccttcctgccggggccctcccggagcccctcaaggctttcacgcagccacagaaaagaaacaagccgtcattaaaccaagcgctaattacagcccggaggagaagggccgtcccgcccgctcacctgtgggagtaacgcggtcagtcagagccggggcgggcggcgcgaggcggcgcggagcggggcacggggcgaaggcaacgcagcgactcccgcccgccgcgcgcttcgctttttatagggccgccgccgccgccgcctcgccataaaaggaaactttcggagcgcgccgctctgattggctgccgccgcacctctccgcctcgccccgccccgcccctcgccccgccccgccccgcctggcgcgcgccccccccccccccccgcccccatcgctgcacaaaataattaaaaaataaataaatacaaaattgggggtggggaggggggggagatggggagagtgaagcagaacgtggggctcacctcgaccatggtaatagcgatgactaatacgtagatgtactgccaagtaggaaagtcccataaggtcatgtactgggcataatgccaggcgggccatttaccgtcattgacgtcaatagggggcgtacttggcatatgatacacttgatgtactgccaagtgggcagtttaccgtaaatactccacccattgacgtcaatggaaagtccctattggcgttactatgggaacatacgtcattattgacgtcaatgggcgggggtcgttgggcggtcagccaggcgggccatttaccgtaagttatgtaacgcggaacaacaacaattgcattcattttatgtttcaggttcagggggaggtgtggtcctgcgattccatcgagtgcacctacaccctgctgaagaccctatgcggcctaagagacctgctaccaatgaattaaaaaaaaatgattaataaaaaatcacttacttgaaatcagcaataaggtctctgttgaaattttctcccagcagcacctcacttccctcttcccaactctggtattctaaaccccgttcagcggcatactttctccatactttaaaggggatgtcaaattttagctcctctcctgtacccacaatcttcatgtctttcttcccagatgaccaagagagtccggctcagtgactccttcaaccctgtctacccctatgaagatgaaagcacctcccaacacccctttataaacccagggtttatttccccaaatggcttcacacaaagcccagacggagttcttactttaaaatgtttaaccccactaacaaccacaggcggatctctacagctaaaagtgggagggggacttacagtggatgacactgatggtaccttacaagaaaacatacgtgctacagcacccattactaaaaataatcactctgtagaactatccattggaaatggattagaaactcaaaacaataaactatgtgccaaattgggaaatgggttaaaatttaacaacggtgacatttgtataaaggatagtattaacaccttatggactggaataaaccctccacctaactgtcaaattgtggaaaacactaatacaaatgatggcaaacttactttagtattagtaaaaaatggagggcttgttaatggctacgtgtctctagttggtgtatcagacactgtgaaccaaatgttcacacaaaagacagcaaacatccaattaagattatattttgactcttctggaaatctattaactgaggaatcagacttaaaaattccacttaaaaataaatcttctacagcgaccagtgaaactgtagccagcagcaaagcctttatgccaagtactacagcttatcccttcaacaccactactagggatagtgaaaactacattcatggaatatgttactacatgactagttatgatagaagtctatttcccttgaacatttctataatgctaaacagccgtatgatttcttccaatgttgcctatgccatacaatttgaatggaatctaaatgcaagtgaatctccagaaagcaacatagctacgctgaccacatccccctttttcttttcttacattacagaagacgacaactaaaataaagtttaagtgtttttatttaaaatcacaaaattcgagtagttattttgcctccaccttcccatttgacagaatacacagtcctttctccccggctggccttaaaaagcatcatatcatgggtaacagacatattcttaggtgttatattccacacggtttcctgtcgagccaaacgctcatcagtgatattaataaactccccgggcagctcacttaagttcatgtcgctgtccagctgctgagccacaggctgctgtccaacttgcggttgcttaacgggcggcgaaggagaagtccacgcctacatgggggtagagtcataatcgtgcatcaggatagggcggtggtgctgcagcagcgcgcgaataaactgctgccgccgccgctccgtcctgcaggaatacaacatggcagtggtctcctcagcgatgattcgcaccgcccgcagcataaggcgccttgtcctccgggcacagcagcgcaccctgatctcacttaaatcagcacagtaactgcagcacagcaccacaatattgttcaaaatcccacagtgcaaggcgctgtatccaaagctcatggcggggaccacagaacccacgtggccatcataccacaagcgcaggtagattaagtggcgacccctcataaacacgctggacataaacattacctcttttggcatgttgtaattcaccacctcccggtaccatataaacctctgattaaacatggcgccatccaccaccatcctaaaccagctggccaaaacctgcccgccggctatacactgcagggaaccgggactggaacaatgacagtggagagcccaggactcgtaaccatggatcatcatgctcgtcatgatatcaatgttggcacaacacaggcacacgtgcatacacttcctcaggattacaagctcctcccgcgttagaaccatatcccagggaacaacccattcctgaatcagcgtaaatcccacactgcagggaagacctcgcacgtaactcacgttgtgcattgtcaaagtgttacattcgggcagcagcggatgatcctccagtatggtagcgcgggtttctgtctcaaaaggaggtagacgatccctactgtacggagtgcgccgagacaaccgagatcgtgttggtcgtagtgtcatgccaaatggaacgccggacgtagtcattctcgtattttgtatagcaaaacgcggccctggcagaacacactcttcttcgccttctatcctgccgcttagcgtgttccgtgtgatagttcaagtacagccacactcttaagttggtcaaaagaatgctggcttcagttgtaatcaaaactccatcgcatctaattgttctgaggaaatcatccacggtagcatatgcaaatcccaaccaagcaatgcaactggattgcgtttcaagcaggagaggagagggaagagacggaagaaccatgttaatttttattccaaacgatctcgcagtacttcaaattgtagatcgcgcagatggcatctctcgcccccactgtgttggtgaaaaagcacagctaaatcaaaagaaatgcgattttcaaggtgctcaacggtggcttccaacaaagcctccacgcgcacatccaagaacaaaagaataccaaaagaaggagcattttctaactcctcaatcatcatattacattcctgcaccattcccagataattttcagctttccagccttgaattattcgtgtcagttcttgtggtaaatccaatccacacattacaaacaggtcccggagggcgccctccaccaccattcttaaacacaccctcataatgacaaaatatcttgctcctgtgtcacctgtagcgaattgagaatggcaacatcaattgacatgcccttggctctaagttcttctttaagttctagttgtaaaaactctctcatattatcaccaaactgcttagccagaagccccccgggaacaagagcaggggacgctacagtgcagtacaagcgcagacctccccaattggctccagcaaaaacaagattggaataagcatattgggaaccaccagtaatatcatcgaagttgctggaaatataatcaggcagagtttcttgtagaaattgaataaaagaaaaatttgccaaaaaaacattcaaaacctctgggatgcaaatgcaataggttaccgcgctgcgctccaacattgttagttttgaattagtctgcaaaaataaaaaaaaaacaagcgtcatatcatagtagcctgacgaacaggtggataaatcagtctttccatcacaagacaagccacagggtctccagctcgaccctcgtaaaacctgtcatcgtgattaaacaacagcaccgaaagttcctcgcggtgaccagcatgaataagtcttgatgaagcatacaatccagacatgttagcatcagttaaggagaaaaaacagccaacatagcctttgggtataattatgcttaatcgtaagtatagcaaagccacccctcgcggatacaaagtaaaaggcacaggagaataaaaaatataattatttctctgctgctgtttaggcaacgtcgcccccggtccctctaaatacacatacaaagcctcatcagccatggcttaccagagaaagtacagcgggcacacaaaccacaagctctaaagtcactctccaacctctccacaatatatatacacaagccctaaactgacgtaatgggactaaagtgtaaaaaatcccgccaaacccaacacacaccccgaaactgcgtcaccagggaaaagtacagtttcacttccgcaatcccaacaagcgtcacttcctctttctcacggtacgtcacatcccattaacttacaacgtcattttcccacggccgcgccgccccttttaaccgttaaccccacagccaatcaccacacggcccacactttttaaaatcacctcatttacatattggcaccattccatctataaggtatattattgatgatggccaagctatttaggtgacactatagaatactcaagctatgcatcaagcttggtaccgagctcggatccactagtaacggccgccagtgtgctggaattcgcccttgtttaaacgcgatcgcttgagatcgttttggtctgcgcgtaatctcttgctctgaaaacgaaaaaaccgccttgcagggcggtttttcgaaggttctctgagctaccaactctttgaaccgaggtaactggcttggaggagcgcagtcaccaaaacttgtcctttcagtttagccttaaccggcgcatgacttcaagactaactcctctaaatcaattaccagtggctgctgccagtggtgcttttgcatgtctttccgggttggactcaagacgatagttaccggataaggcgcagcggtcggactgaacggggggttcgtgcatacagtccagcttggagcgaactgcctacccggaactgagtgtcaggcgtggaatgagacaaacgcggccataacagcggaatgacaccggtaaaccgaaaggcaggaacaggagagcgcacgagggagccgccagggggaaacgcctggtatctttatagtcctgtcgggtttcgccaccactgatttgagcgtcagatttcgtgatgcttgtcaggggggcggagcctatggaaaaacggctttgccgcggccctctcacttccctgttaagtatcttcctggcatcttccaggaaatctccgccccgttcgtaagccatttccgctcgccgcagtcgaacgaccgagcgtagcgagtcagtgagcgaggaagcggaatatatcctgtatcacatattctgctgacgcaccggtgcagccttttttctcctgccacatgaagcacttcactgacaccctcatcagtgccaacatagtaagccagtatacactccgctagcgcgatcgcttaattaatttaaatcctgcagggtttaaacggccggcctagggataacagggtaatcgtaactataacggtcctaaggtagcgaatgatgtccggcggtgcttttgccgttacgcaccaccccgtcagtagctgaacaggagggacagctgatagaaacagaagccactggagcacctcaaaaacaccatcatacactaaatcagtaagttggcagcatcacccgacgcactttgcgccgaataaatacctgtgacggaagatcacttcgcagaataaataaatcctggtgtccctgttgataccgggaagccctgggccaacttttggcgaaaatgagacgttgatcggcacgtaagaggttccaactttcaccataatgaaataagatcactaccgggcgtattttttgagttatcgagattttcaggagctaaggaagctaaaatggagaaaaaaatcactggatataccaccgttgatatatcccaatggcatcgtaaagaacattttgaggcatttcagtcagttgctcaatgtacctataaccagaccgttcagctggatattacggcctttttaaagaccgtaaagaaaaataagcacaagttttatccggcctttattcacattcttgcccgcctgatgaatgctcatccggaattccgtatggcaatgaaagacggtgagctggtgatatgggatagtgttcacccttgttacaccgttttccatgagcaaactgaaacgttttcatcgctctggagtgaataccacgacgatttccggcagtttctacacatatattcgcaagatgtggcgtgttacggtgaaaacctggcctatttccctaaagggtttattgagaatatgtttttcgtctcagccaatccctgggtgagtttcaccagttttgatttaaacgtggccaatatggacaacttcttcgcccccgttttcaccatgggcaaatattatacgcaaggcgacaaggtgctgatgccgctggcgattcaggttcatcatgccgtctgtgatggcttccatgtcggcagaatgcttaatgaattacaacagtactgcgatgagtggcagggcggggcgtaacctgcaggttaattaaggaagggcgaattctgcagatatccatcacactggcggccgctcgagcatgcatctagagggcccaattcgccctatagtgagtcgtattacaattcactggcc

SEQ ID NO: 177 - DNA, 34971 bp, Artificial Sequence
  PS3
catcatcaataatataccttatagatggaatggtgccaatatgtaaatgaggtgattttaaaaagtgtgggccgtgtggtgattggctgtggggttaacggttaaaaggggcggcgcggccgtgggaaaatgacgttttatgggggtggagtttataacttcgtatagcatacattatacgaagttatttttgcaagttgtcgcgggaaatgttacgcataaaaaggcttcttttctcacggaactacttagttttcccacggtatttaacaggaaatgaggtagttttgaccggatgcaagtgaaaattgctgattttcgcgcgaaaactgaatgaggaagtgtttttctgaataatgtggtatttatggcagggtggagtatttgttcagggccaggtagactttgacccattacgtggaggtttcgattaccgtgttttttacctgaatttccgcgtaccgtgtcaaagtcttctgtttttacgtaggtgtcagctgatcgctagggtatttataacttcgtatagcatacattatacgaagttatggaatgtttatgccttaccagtgtaacatgaatcatgtgaaagtgttgttggaaccagatgccttttccagaatgagcctaacaggaatctttgacatgaacacgcaaatctggaagatcctgaggtatgatgatacgagatcgagggtgcgcgcatgcgaatgcggaggcaagcatgccaggttccagccggtgtgtgtagatgtgaccgaagatctcagaccggatcatttggttattgcccgcactggagcagagttcggatccagtggagaagaaactgactaaggtgagtattgggaaaactttggggtgggattttcagatggacagattgagtaaaaatttgttttttctgtcttgcagctgacatgagtggaaatgcttcttttaaggggggagtcttcagcccttatctgacagggcgtctcccatcctgggcaggagttcgtcagaatgttatgggatctactgtggatggaagacccgttcaacccgccaattcttcaacgctgacctatgctactttaagttcttcacctttggacgcagctgcagccgctgccgccgcctctgtcgccgctaacactgtgcttggaatgggttactatggaagcatcgtggctaattccacttcctctaataacccttctacactgactcaggacaagttacttgtccttttggcccagctggaggctttgacccaacgtctgggtgaactttctcagcaggtggccgagttgcgagtacaaactgagtctgctgtcggcacggcaaagtctaaataaaaaaaattccagaatcaatgaataaataaacgagcttgttgttgatttaaaatcaagtgtttttatttcatttttcgcgcacggtatgccctggaccaccgatctcgatcattgagaactcggtggattttttccagaatcctatagaggtgggattgaatgtttagatacatgggcattaggccgtctttggggtggagatagctccattgaagggattcatgctccggggtagtgttgtaaatcacccagtcataacaaggtcgcagtgcatggtgttgcacaatatcttttagaagtaggctgattgccacagataagcccttggtgtaggtgtttacaaaccggttgagctgggaggggtgcattcgaggtgaaattatgtgcattttggattggatttttaagttggcaatattgccgccaagatcccgtcttgggttcatgttatgaaggactaccaagacggtgtatccggtacatttaggaaatttatcgtgcagcttggatggaaaagcgtggaaaaatttggagacacccttgtgtcctccgagattttccatgcactcatccatgataatagcaatggggccgtgggcagcggcgcgggcaaacacgttccgtgggtctgacacatcatagttatgttcctgagttaaatcatcataagccattttaatgaatttggggcggagcgtaccagattggggtatgaatgttccttcgggccccggagcatagttcccctcacagatttgcatttcccaagctttcagttctgagggtggaatcatgtccacctggggggctatgaagaacaccgtttcgggggcgggggtgattagttgggatgatagcaagtttctgagcaattgagatttgccacatccggtggggccataaataattccgattacaggttgcaggtggtagtttagggaacggcaactgccgtcttctcgaagcaagggggccacctcgttcatcatttcccttacatgcatattttcccgcaccaaatccattaggaggcgctctcctcctagtgatagaagttcttgtagtgaggaaaagtttttcagcggttttagaccgtcagccatgggcattttggaaagagtttgctgcaaaagttctagtctgttccacagttcagtgatgtgttctatggcatctcgatccagcagacctcctcgtttcgcgggtttggacggctcctggagtagggtatgagacgatgggcgtccagcgctgccagggttcggtccttccagggtctcagtgttcgagtcagggttgtttccgtcacagtgaaggggtgtgcgcctgcttgggcgcttgccagggtgcgcttcagactcattctgctggtggagaacttctgtcgcttggcgccctgtatgtcggccaagtagcagtttaccatgagttcgtagttgagcgcctcggctgcgtggcctttggcgcggagcttacctttggaagttttcttgcataccgggcagtataggcatttcagcgcatacagcttgggcgcaaggaaaatggattctggggagtatgcatccgcgccgcaggaggcgcaaacagtttcacattccaccagccaggttaaatccggttcattggggtcaaaaacaagttttccgccatattttttgatgcgtttcttacctttggtctccataagttcgtgtcctcgttgagtgacaaacaggctgtccgtatctccgtagactgattttacaggcctcttctccagtggagtgcctcggtcttcttcgtacaggaactctgaccactctgatacaaaggcgcgcgtccaggccagcacaaaggaggctatgtgggaggggtagcgatcgttgtcaaccagggggtccaccttttccaaagtatgcaaacacatgtcaccctcttcaacatccaggaatgtgattggcttgtaggtgtatttcacgtgacctggggtccccgctgggggggtataaaagggggcggttctttgctcttcctcactgtcttccggatcgctgtccaggaacgtcagctgttggggtaggtattccctctcgaaggcgggcatgacctctgcactcaggttgtcagtttctaagaacgaggaggatttgatattgacagtgccggttgagatgcctttcatgaggttttcgtccatttggtcagaaaacacaatttttttattgtcaagtttggtggcaaatgatccatacagggcgttggataaaagtttggcaatggatcgcatggtttggttcttttccttgtccgcgcgctctttggcggcgatgttgagttggacatactcgcgtgccaggcacttccattcggggaagatagttgttaattcatctggcacgattctcacttgccaccctcgattatgcaaggtaattaaatccacactggtggccacctcgcctcgaaggggttcattggtccaacagagcctacctcctttcctagaacagaaagggggaagtgggtctagcataagttcatcgggagggtctgcatccatggtaaagattcccggaagtaaatccttatcaaaatagctgatgggagtggggtcatctaaggccatttgccattctcgagctgccagtgcgcgctcatatgggttaaggggactgccccagggcatgggatgggtgagagcagaggcatacatgccacagatgtcatagacgtagatgggatcctcaaagatgcctatgtaggttggatagcatcgcccccctctgatacttgctcgcacatagtcatatagttcatgtgatggcgctagcagccccggacccaagttggtgcgattgggtttttctgttctgtagacgatctggcgaaagatggcgtgagaattggaagagatggtgggtctttgaaaaatgttgaaatgggcatgaggtagacctacagagtctctgacaaagtgggcataagattcttgaagcttggttaccagttcggcggtgacaagtacgtctagggcgcagtagtcaagtgtttcttgaatgatgtcataacctggttggtttttcttttcccacagttcgcggttgagaaggtattcttcgcgatccttccagtactcttctagcggaaacccgtctttgtctgcacggtaagatcctagcatgtagaactgattaactgccttgtaagggcagcagcccttctctacgggtagagagtatgcttgagcagcttttcgtagcgaagcgtgagtaagggcaaaggtgtctctgaccatgactttgagaaattggtatttgaagtccatgtcgtcacaggctccctgttcccagagttggaagtctacccgtttcttgtaggcggggttgggcaaagcgaaagtaacatcattgaagagaatcttaccggctctgggcataaaattgcgagtgatgcggaaaggctgtggtacttccgctcgattgttgatcacctgggcagctaggacgatttcgtcgaaaccgttgatgttgtgtcctacgatgtataattctatgaaacgcggcgtgcctctgacgtgaggtagcttactgagctcatcaaaggttaggtctgtggggtcagataaggcgtagtgttcgagagcccattcgtgcaggtgaggatttgcatgtaggaatgatgaccaaagatctaccgccagtgctgtttgtaactggtcccgatactgacgaaaatgccggccaattgccattttttctggagtgacacagtagaaggttctggggtcttgttgccatcgatcccacttgagtttaatggctagatcgtgggccatgttgacgagacgctcttctcctgagagtttcatgaccagcatgaaaggaactagttgtttgccaaaggatcccatccaggtgtaagtttccacatcgtaggtcaggaagagtctttctgtgcgaggatgagagccgatcgggaagaactggatttcctgccaccagttggaggattggctgttgatgtgatggaagtagaagtttctgcggcgcgccgagcattcgtgtttgtgcttgtacagacggccgcagtagtcgcagcgttgcacgggttgtatctcgtgaatgagctgtacctggcttcccttgacgagaaatttcagtgggaagccgaggcctggcgattgtatctcgtgctcttctatattcgctgtatcggcctgttcatcttctgtttcgatggtggtcatgctgacgagcccccgcgggaggcaagtccagacctcggcgcgggaggggcggagctgaaggacgagagcgcgcaggctggagctgtccagagtcctgagacgctgcggactcaggttagtaggtagggacagaagattaacttgcatgatcttttccagggcgtgcgggaggttcagatggtacttgatttccacaggttcgtttgtagagacgtcaatggcttgcagggttccgtgtcctttgggcgccactaccgtacctttgttttttcttttgatcggtggtggctctcttgcttcttgcatgctcagaagcggtgacggggacgcgcgccgggcggcagcggttgttccggacccgggggcatggctggtagtggcacgtcggcgccgcgcacgggcaggttctggtattgcgctctgagaagacttgcgtgcgccaccacgcgtcgattgacgtcttgtatctgacgtctctgggtgaaagctaccggccccgtgagcttgaacctgaaagagagttcaacagaatcaatttcggtatcgttaacggcagcttgtctcagtatttcttgtacgtcaccagagttgtcctggtaggcgatctccgccatgaactgctcgatttcttcctcctgaagatctccgcgacccgctctttcgacggtggccgcgaggtcattggagatacggcccatgagttgggagaatgcattcatgcccgcctcgttccagacgcggctgtaaaccacggccccctcggagtctcttgcgcgcatcaccacctgagcgaggttaagctccacgtgtctggtgaagaccgcatagttgcataggcgctgaaaaaggtagttgagtgtggtggcaatgtgttcggcgacgaagaaatacatgatccatcgtctcagcggcatttcgctaacatcgcccagagcttccaagcgctccatggcctcgtagaagtccacggcaaaattaaaaaactgggagtttcgcgcggacacggtcaattcctcctcgagaagacggatgagttcggctatggtggcccgtacttcgcgttcgaaggctcccgggatctcttcttcctcttctatctcttcttccactaacatctcttcttcgtcttcaggcgggggcggagggggcacgcggcgacgtcgacggcgcacgggcaaacggtcgatgaatcgttcaatgacctctccgcggcggcggcgcatggtttcagtgacggcgcggccgttctcgcgcggtcgcagagtaaaaacaccgccgcgcatctccttaaagtggtgactgggaggttctccgtttgggagggagagggcgctgattatacattttattaattggcccgtagggactgcgcgcagagatctgatcgtgtcaagatccacgggatctgaaaacctttcgacgaaagcgtctaaccagtcacagtcacaaggtaggctgagtacggcttcttgtgggcgggggtggttatgtgttcggtctgggtcttctgtttcttcttcatctcgggaaggtgagacgatgctgctggtgatgaaattaaagtaggcagttctaagacggcggatggtggcgaggagcaccaggtctttgggtccggcttgctggatacgcaggcgattggccattccccaagcattatcctgacatctagcaagatctttgtagtagtcttgcatgagccgttctacgggcacttcttcctcacccgttctgccatgcatacgtgtgagtccaaatccgcgcattggttgtaccagtgccaagtcagctacgactctttcggcgaggatggcttgctgtacttgggtaagggtggcttgaaagtcatcaaaatccacaaagcggtggtaagcccctgtattaatggtgtaagcacagttggccatgactgaccagttaactgtctggtgaccagggcgcacgagctcggtgtatttaaggcgcgaataggcgcgggtgtcaaagatgtaatcgttgcaggtgcgcaccagatactggtaccctataagaaaatgcggcggtggttggcggtagagaggccatcgttctgtagctggagcgccaggggcgaggtcttccaacataaggcggtgatagccgtagatgtacctggacatccaggtgattcctgcggcggtagtagaagcccgaggaaactcgcgtacgcggttccaaatgttgcgtagcggcatgaagtagttcattgtaggcacggtttgaccagtgaggcgcgcgcagtcattgatgctctatagacacggagaaaatgaaagcgttcagcgactcgactccgtagcctggaggaacgtgaacgggttgggtcgcggtgtaccccggttcgagacttgtactcgagccggccggagccgcggctaacgtggtattggcactcccgtctcgacccagcctacaaaaatccaggatacggaatcgagtcgttttgctggtttccgaatggcagggaagtgagtcctattttttttttttttgccgctcagatgcatcccgtgctgcgacagatgcgcccccaacaacagcccccctcgcagcagcagcagcagcaaccacaaaaggctgtccctgcaactactgcaactgccgccgtgagcggtgcgggacagcccgcctatgatctggacttggaagagggcgaaggactggcacgtctaggtgcgccttcgcccgagcggcatccgcgagttcaactgaaaaaagattctcgcgaggcgtatgtgccccaacagaacctatttagagacagaagcggcgaggagccggaggagatgcgagcttcccgctttaacgcgggtcgtgagctgcgtcacggtttggaccgaagacgagtgttgcgagacgaggatttcgaagttgatgaagtgacagggatcagtcctgccagggcacacgtggctgcagccaaccttgtatcggcttacgagcagacagtaaaggaagagcgtaacttccaaaagtcttttaataatcatgtgcgaaccctgattgcccgcgaagaagttacccttggtttgatgcatttgtgggatttgatggaagctatcattcagaaccctactagcaaacctctgaccgcccagctgtttctggtggtgcaacacagcagagacaatgaggctttcagagaggcgctgctgaacatcaccgaacccgaggggagatggttgtatgatcttatcaacattctacagagtatcatagtgcaggagcggagcctgggcctggccgagaaggtagctgccatcaattactcggttttgagcttgggaaaatattacgctcgcaaaatctacaagactccatacgttcccatagacaaggaggtgaagatagatgggttctacatgcgcatgacgctcaaggtcttgaccctgagcgatgatcttggggtgtatcgcaatgacagaatgcatcgcgcggttagcgccagcaggaggcgcgagttaagcgacagggaactgatgcacagtttgcaaagagctctgactggagctggaaccgagggtgagaattacttcgacatgggagctgacttgcagtggcagcctagtcgcagggctctgagcgccgcgacggcaggatgtgagcttccttacatagaagaggcggatgaaggcgaggaggaagagggcgagtacttggaagactgatggcacaacccgtgttttttgctagatggaacagcaagcaccggatcccgcaatgcgggcggcgctgcagagccagccgtccggcattaactcctcggacgattggacccaggccatgcaacgtatcatggcgttgacgactcgcaaccccgaagcctttagacagcaaccccaggccaaccgtctatcggccatcatggaagctgtagtgccttcccgatctaatcccactcatgagaaggtcctggccatcgtgaacgcgttggtggagaacaaagctattcgtccagatgaggccggactggtatacaacgctctcttagaacgcgtggctcgctacaacagtagcaatgtgcaaaccaatttggaccgtatgataacagatgtacgcgaagccgtgtctcagcgcgaaaggttccagcgtgatgccaacctgggttcgctggtggcgttaaatgctttcttgagtactcagcctgctaatgtgccgcgtggtcaacaggattatactaactttttaagtgctttgagactgatggtatcagaagtacctcagagcgaagtgtatcagtccggtcctgattacttctttcagactagcagacagggcttgcagacggtaaatctgagccaagcttttaaaaaccttaaaggtttgtggggagtgcatgccccggtaggagaaagagcaaccgtgtctagcttgttaactccgaactcccgcctgttattactgttggtagctcctttcaccgacagcggtagcatcgaccgtaattcctatttgggttacctactaaacctgtatcgcgaagccatagggcaaagtcaggtggacgagcagacctatcaagaaattacccaagtcagtcgcgctttgggacaggaagacactggcagtttggaagccactctgaacttcttgcttaccaatcggtctcaaaagatccctcctcaatatgctcttactgcggaggaggagaggatccttagatatgtgcagcagagcgtgggattgtttctgatgcaagagggggcaactccgactgcagcactggacatgacagcgcgaaatatggagcccagcatgtatgccagtaaccgacctttcattaacaaactgctggactacttgcacagagctgccgctatgaactctgattatttcaccaatgccatcttaaacccgcactggctgcccccacctggtttctacacgggcgaatatgacatgcccgaccctaatgacggatttctgtgggacgacgtggacagcgatgttttttcacctctttctgatcatcgcacgtggaaaaaggaaggcggtgatagaatgcattcttctgcatcgctgtccggggtcatgggtgctaccgcggctgagcccgagtctgcaagtccttttcctagtctacccttttctctacacagtgtacgtagcagcgaagtgggtagaataagtcgcccgagtttaatgggcgaagaggagtacctaaacgattccttgctcagaccggcaagagaaaaaaatttcccaaacaatggaatagaaagtttggtggataaaatgagtagatggaagacttatgctcaggatcacagagacgagcctgggatcatggggactacaagtagagcgagccgtagacgccagcgccatgacagacagaggggtcttgtgtgggacgatgaggattcggccgatgatagcagcgtgttggacttgggtgggagaggaaggggcaacccgtttgctcatttgcgccctcgcttgggtggtatgttgtgaaaaaaaataaaaaagaaaaactcaccaaggccatggcgacgagcgtacgttcgttcttctttattatctgtgtctagtataatgaggcgagtcgtgctaggcggagcggtggtgtatccggagggtcctcctccttcgtacgagagcgtgatgcagcagcagcaggcgacggcggtgatgcaatccccactggaggctccctttgtgcctccgcgatacctggcacctacggagggcagaaacagcattcgttactcggaactggcacctcagtacgataccaccaggttgtatctggtggacaacaagtcggcggacattgcttctctgaactatcagaatgaccacagcaacttcttgaccacggtggtgcagaacaatgactttacccctacggaagccagcacccagaccattaactttgatgaacgatcgcggtggggcggtcagctaaagaccatcatgcatactaacatgccaaacgtgaacgagtatatgtttagtaacaagttcaaagcgcgtgtgatggtgtccagaaaacctcccgacggtgctgcagttggggatacttatgatcacaagcaggatattttggaatatgagtggttcgagtttactttgccagaaggcaacttttcagttactatgactattgatttgatgaacaatgccatcatagataattacttgaaagtgggtagacagaatggagtgcttgaaagtgacattggtgttaagttcgacaccaggaacttcaagctgggatgggatcccgaaaccaagttgatcatgcctggagtgtatacgtatgaagccttccatcctgacattgtcttactgcctggctgcggagtggattttaccgagagtcgtttgagcaaccttcttggtatcagaaaaaaacagccatttcaagagggttttaagattttgtatgaagatttagaaggtggtaatattccggccctcttggatgtagatgcctatgagaacagtaagaaagaacaaaaagccaaaatagaagctgctacagctgctgcagaagctaaggcaaacatagttgccagcgactctacaagggttgctaacgctggagaggtcagaggagacaattttgcgccaacacctgttccgactgcagaatcattattggccgatgtgtctgaaggaacggacgtgaaactcactattcaacctgtagaaaaagatagtaagaatagaagctataatgtgttggaagacaaaatcaacacagcctatcgcagttggtatctttcgtacaattatggcgatcccgaaaaaggagtgcgttcctggacattgctcaccacctcagatgtcacctgcggagcagagcaggtttactggtcgcttccagacatgatgaaggatcctgtcactttccgctccactagacaagtcagtaactaccctgtggtgggtgcagagcttatgcccgtcttctcaaagagcttctacaacgaacaagctgtgtactcccagcagctccgccagtccacctcgcttacgcacgtcttcaaccgctttcctgagaaccagattttaatccgtccgccggcgcccaccattaccaccgtcagtgaaaacgttcctgctctcacagatcacgggaccctgccgttgcgcagcagtatccggggagtccaacgtgtgaccgttactgacgccagacgccgcacctgtccctacgtgtacaaggcactgggcatagtcgcaccgcgcgtcctttcaagccgcactttctaaaaaaaaaatgtccattcttatctcgcccagtaataacaccggttggggtctgcgcgctccaagcaagatgtacggaggcgcacgcaaacgttctacccaacatcccgtgcgtgttcgcggacattttcgcgctccatggggtgccctcaagggccgcactcgcgttcgaaccaccgtcgatgatgtaatcgatcaggtggttgccgacgcccgtaattatactcctactgcgcctacatctactgtggatgcagttattgacagtgtagtggctgacgctcgcaactatgctcgacgtaagagccggcgaaggcgcattgccagacgccaccgagctaccactgccatgcgagccgcaagagctctgctacgaagagctagacgcgtggggcgaagagccatgcttagggcggccagacgtgcagcttcgggcgccagcgccggcaggtcccgcaggcaagcagccgctgtcgcagcggcgactattgccgacatggcccaatcgcgaagaggcaatgtatactgggtgcgtgacgctgccaccggtcaacgtgtacccgtgcgcacccgtccccctcgcacttagaagatactgagcagtctccgatgttgtgtcccagcggcgaggatgtccaagcgcaaatacaaggaagaaatgctgcaggttatcgcacctgaagtctacggccaaccgttgaaggatgaaaaaaaaccccgcaaaatcaagcgggttaaaaaggacaaaaaagaagaggaagatggcgatgatgggctggcggagtttgtgcgcgagtttgccccacggcgacgcgtgcaatggcgtgggcgcaaagttcgacatgtgttgagacctggaacttcggtggtctttacacccggcgagcgttcaagcgctacttttaagcgttcctatgatgaggtgtacggggatgatgatattcttgagcaggcggctgaccgattaggcgagtttgcttatggcaagcgtagtagaataacttccaaggatgagacagtgtcaatacccttggatcatggaaatcccacccctagtcttaaaccggtcactttgcagcaagtgttacccgtaactccgcgaacaggtgttaaacgcgaaggtgaagatttgtatcccactatgcaactgatggtacccaaacgccagaagttggaggacgttttggagaaagtaaaagtggatccagatattcaacctgaggttaaagtgagacccattaagcaggtagcgcctggtctgggggtacaaactgtagacattaagattcccactgaaagtatggaagtgcaaactgaacccgcaaagcctactgccacctccactgaagtgcaaacggatccatggatgcccatgcctattacaactgacgccgccggtcccactcgaagatcccgacgaaagtacggtccagcaagtctgttgatgcccaattatgttgtacacccatctattattcctactcctggttaccgaggcactcgctactatcgcagccgaaacagtacctcccgccgtcgccgcaagacacctgcaaatcgcagtcgtcgccgtagacgcacaagcaaaccgactcccggcgccctggtgcggcaagtgtaccgcaatggtagtgcggaacctttgacactgccgcgtgcgcgttaccatccgagtatcatcacttaatcaatgttgccgctgcctccttgcagatatggccctcacttgtcgccttcgcgttcccatcactggttaccgaggaagaaactcgcgccgtagaagagggatgttgggacgcggaatgcgacgctacaggcgacggcgtgctatccgcaagcaattgcggggtggttttttaccagccttaattccaattatcgctgctgcaattggcgcgataccaggcatagcttccgtggcggttcaggcctcgcaacgacattgacattggaaaaaaaacgtataaataaaaaaaaatacaatggactctgacactcctggtcctgtgactatgttttcttagagatggaagacatcaatttttcatccttggctccgcgacacggcacgaagccgtacatgggcacctggagcgacatcggcacgagccaactgaacgggggcgccttcaattggagcagtatctggagcgggcttaaaaattttggctcaaccataaaaacatacgggaacaaagcttggaacagcagtacaggacaggcgcttagaaataaacttaaagaccagaacttccaacaaaaagtagtcgatgggatagcttccggcatcaatggagtggtagatttggctaaccaggctgtgcagaaaaagataaacagtcgtttggacccgccgccagcaaccccaggtgaaatgcaagtggaggaagaaattcctccgccagaaaaacgaggcgacaagcgtccgcgtcccgatttggaagagacgctggtgacgcgcgtagatgaaccgccttcttatgaggaagcaacgaagcttggaatgcccaccactagaccgatagccccaatggccaccggggtgatgaaaccttctcagttgcatcgacccgtcaccttggatttgccccctccccctgctgctactgctgtacccgcttctaagcctgtcgctgccccgaaaccagtcgccgtagccaggtcacgtcccgggggcgctcctcgtccaaatgcgcactggcaaaatactctgaacagcatcgtgggtctaggcgtgcaaagtgtaaaacgccgtcgctgcttttaattaaatatggagtagcgcttaacttgcctatctgtgtatatgtgtcattacacgccgtcacagcagcagaggaaaaaaggaagaggtcgtgcgtcgacgctgagttactttcaagatggccaccccatcgatgctgccccaatgggcatacatgcacatcgccggacaggatgcttcggagtacctgagtccgggtctggtgcagttcgcccgcgccacagacacctacttcaatctgggaaataagtttagaaatcccaccgtagcgccgacccacgatgtgaccaccgaccgtagccagcggctcatgttgcgcttcgtgcccgttgaccgggaggacaatacatactcttacaaagtgcggtacaccctggccgtgggcgacaacagagtgctggatatggccagcacgttctttgacattaggggcgtgttggacagaggtcccagtttcaaaccctattctggtacggcttacaactctctggctcctaaaggcgctccaaatgcatctcaatggattgcaaaaggcgtaccaactgcagcagccgcaggcaatggtgaagaagaacatgaaacagaggagaaaactgctacttacacttttgccaatgctcctgtaaaagccgaggctcaaattacaaaagagggcttaccaataggtttggagatttcagctgaaaacgaatctaaacccatctatgcagataaactttatcagccagaacctcaagtgggagatgaaacttggactgacctagacggaaaaaccgaagagtatggaggcagggctctaaagcctactactaacatgaaaccctgttacgggtcctatgcgaagcctactaatttaaaaggtggtcaggcaaaaccgaaaaactcggaaccgtcgagtgaaaaaattgaatatgatattgacatggaattttttgataactcatcgcaaagaacaaacttcagtcctaaaattgtcatgtatgcagaaaatgtaggtttggaaacgccagacactcatgtagtgtacaaacctggaacagaagacacaagttccgaagctaatttgggacaacagtctatgcccaacagacccaactacattggcttcagagataactttattggactcatgtactataacagtactggtaacatgggggtgctggctggtcaagcgtctcagttaaatgcagtggttgacttgcaggacagaaacacagaactttcttaccaactcttgcttgactctctgggcgacagaaccagatactttagcatgtggaatcaggctgtggacagttatgatcctgatgtacgtgttattgaaaatcatggtgtggaagatgaacttcccaactattgttttccactggacggcataggtgttccaacaaccagttacaaatcaatagttccaaatggagaagataataataattggaaagaacctgaagtaaatggaacaagtgagatcggacagggtaatttgtttgccatggaaattaaccttcaagccaatctatggcgaagtttcctttattccaatgtggctctgtatctcccagactcgtacaaatacaccccgtccaatgtcactcttccagaaaacaaaaacacctacgactacatgaacgggcgggtggtgccgccatctctagtagacacctatgtgaacattggtgccaggtggtctctggatgccatggacaatgtcaacccattcaaccaccaccgtaacgctggcttgcgttaccgatctatgcttctgggtaacggacgttatgtgcctttccacatacaagtgcctcaaaaattcttcgctgttaaaaacctgctgcttctcccaggctcctacacttatgagtggaactttaggaaggatgtgaacatggttctacagagttccctcggtaacgacctgcgggtagatggcgccagcatcagtttcacgagcatcaacctctatgctacttttttccccatggctcacaacaccgcttccacccttgaagccatgctgcggaatgacaccaatgatcagtcattcaacgactacctatctgcagctaacatgctctaccccattcctgccaatgcaaccaatattcccatttccattccttctcgcaactgggcggctttcagaggctggtcatttaccagactgaaaaccaaagaaactccctctttggggtctggatttgacccctactttgtctattctggttctattccctacctggatggtaccttctacctgaaccacacttttaagaaggtttccatcatgtttgactcttcagtgagctggcctggaaatgacaggttactatctcctaacgaatttgaaataaagcgcactgtggatggcgaaggctacaacgtagcccaatgcaacatgaccaaagactggttcttggtacagatgctcgccaactacaacatcggctatcagggcttctacattccagaaggatacaaagatcgcatgtattcatttttcagaaacttccagcccatgagcaggcaggtggttgatgaggtcaattacaaagacttcaaggccgtcgccataccctaccaacacaacaactctggctttgtgggttacatggctccgaccatgcgccaaggtcaaccctatcccgctaactatccctatccactcattggaacaactgccgtaaatagtgttacgcagaaaaagttcttgtgtgacagaaccatgtggcgcataccgttctcgagcaacttcatgtctatgggggcccttacagacttgggacagaatatgctctatgccaactcagctcatgctctggacatgacctttgaggtggatcccatggatgagcccaccctgctttatcttctcttcgaagttttcgacgtggtcagagtgcatcagccacaccgcggcatcatcgaggcagtctacctgcgtacaccgttctcggccggtaacgctaccacgtaagaagcttcttgcttcttgcaaatagcagctgcaaccatggcctgcggatcccaaaacggctccagcgagcaagagctcagagccattgtccaagacctgggttgcggaccctattttttgggaacctacgataagcgcttcccggggttcatggcccccgataagctcgcctgtgccattgtaaatacggccggacgtgagacggggggagagcactggttggctttcggttggaacccacgttctaacacctgctacctttttgatccttttggattctcggatgatcgtctcaaacagatttaccagtttgaatatgagggtctcctgcgccgcagcgctcttgctaccaaggaccgctgtattacgctggaaaaatctacccagaccgtgcagggcccccgttctgccgcctgcggacttttctgctgcatgttccttcacgcctttgtgcactggcctgaccgtcccatggacggaaaccccaccatgaaattgctaactggagtgccaaacaacatgcttcattctcctaaagtccagcccaccctgtgtgacaatcaaaaagcactctaccattttcttaatacccattcgccttattttcgctctcatcgtacacacatcgaaagggccactgcgttcgaccgtatggatgttcaataatgactcatgtaaacaacgtgttcaataaacatcactttatttttttacatgtatcaaggctctggattacttatttatttacaagtcgaatgggttctgacgagaatcagaatgacccgcaggcagtgatacgttgcggaactgatacttgggttgccacttgaattcgggaatcaccaacttgggaaccggtatatcgggcaggatgtcactccacagctttctggtcagctgcaaagctccaagcaggtcaggagccgaaatcttgaaatcacaattaggaccagtgctctgagcgcgagagttgcggtacaccggattgcagcactgaaacaccatcagcgacggatgtctcacgcttgccagcacggtgggatctgcaatcatgcccacatccagatcttcagcattggcaatgctgaacggggtcatcttgcaggtctgcctacccatggcgggcacccaattaggcttgtggttgcaatcgcagtgcagggggatcagtatcatcttggcctgatcctgtctgattcctggatacacggctctcatgaaagcatcatattgcttgaaagcctgctgggctttactaccctcggtataaaacatcccgcaggacctgctcgaaaactggttagctgcacagccggcatcattcacacagcagcgggcgtcattgttggctatttgcaccacacttctgccccagcggttttgggtgattttggttcgctcgggattctcctttaaggctcgttgtccgttctcgctggccacatccatctcgataatctgctccttctgaatcataatattgccatgcaggcacttcagcttgccctcataatcattgcagccatgaggccacaacgcacagcctgtacattcccaattatggtgggcgatctgagaaaaagaatgtatcattccctgcagaaatcttcccatcatcgtgctcagtgtcttgtgactagtgaaagttaactggatgcctcggtgctcttcgtttacgtactggtgacagatgcgcttgtattgttcgtgttgctcaggcattagtttaaaacaggttctaagttcgttatccagcctgtacttctccatcagcagacacatcacttccatgcctttctcccaagcagacaccaggggcaagctaatcggattcttaacagtgcaggcagcagctcctttagccagagggtcatctttagcgatcttctcaatgcttcttttgccatccttctcaacgatgcgcacgggcgggtagctgaaacccactgctacaagttgcgcctcttctctttcttcttcgctgtcttgactgatgtcttgcatggggatatgtttggtcttccttggcttctttttggggggtatcggaggaggaggactgtcgctccgttccggagacagggaggattgtgacgtttcgctcaccattaccaactgactgtcggtagaagaacctgaccccacacggcgacaggtgtttttcttcgggggcagaggtggaggcgattgcgaagggctgcggtccgacctggaaggcggatgactggcagaaccccttccgcgttcgggggtgtgctccctgtggcggtcgcttaactgatttccttcgcggctggccattgtgttctcctaggcagagaaacaacagacatggaaactcagccattgctgtcaacatcgccacgagtgccatcacatctcgtcctcagcgacgaggaaaaggagcagagcttaagcattccaccgcccagtcctgccaccacctctaccctagaagataaggaggtcgacgcatctcatgacatgcagaataaaaaagcgaaagagtctgagacagacatcgagcaagacccgggctatgtgacaccggtggaacacgaggaagagttgaaacgctttctagagagagaggatgaaaactgcccaaaacagcgagcagataactatcaccaagatgctggaaatagggatcagaacaccgactacctcatagggcttgacggggaagacgcgctccttaaacatctagcaagacagtcgctcatagtcaaggatgcattattggacagaactgaagtgcccatcagtgtggaagagctcagctgcgcctacgagcttaaccttttttcacctcgtactccccccaaacgtcagccaaacggcacctgcgagccaaatcctcgcttaaacttttatccagcttttgctgtgccagaagtactggctacctatcacatcttttttaaaaatcaaaaaattccagtctcctgccgcgctaatcgcacccgcgccgatgccctactcaatctgggacctggttcacgcttacctgatatagcttccttggaagaggttccaaagatcttcgagggtctgggcaataatgagactcgggccgcaaatgctctgcaaaagggagaaaatggcatggatgagcatcacagcgttctggtggaattggaaggcgataatgccagactcgcagtactcaagcgaagcgtcgaggtcacacacttcgcatatcccgctgtcaacctgccccctaaagtcatgacggcggtcatggaccagttactcattaagcgcgcaagtcccctttcagaagacatgcatgacccagatgcctgtgatgagggtaaaccagtggtcagtgatgagcagctaacccgatggctgggcaccgactctccccgggatttggaagagcgtcgcaagcttatgatggccgtggtgctggttaccgtagaactagagtgtctccgacgtttctttaccgattcagaaaccttgcgcaaactcgaagagaatctgcactacacttttagacacggctttgtgcggcaggcatgcaagatatctaacgtggaactcaccaacctggtttcctacatgggtattctgcatgagaatcgcctaggacaaagcgtgctgcacagcacccttaagggggaagcccgccgtgattacatccgcgattgtgtctatctctacctgtgccacacgtggcaaaccggcatgggtgtatggcagcaatgtttagaagaacagaacttgaaagagcttgacaagctcttacagaaatctcttaaggttctgtggacagggttcgacgagcgcaccgtcgcttccgacctggcagacctcatcttcccagagcgtctcagggttactttgcgaaacggattgcctgactttatgagccagagcatgcttaacaattttcgctctttcatcctggaacgctccggtatcctgcccgccacctgctgcgcactgccctccgactttgtgcctctcacctaccgcgagtgccccccgccgctatggagtcactgctacctgttccgtctggccaactatctctcctaccactcggatgtgatcgaggatgtgagcggagacggcttgctggagtgccactgccgctgcaatctgtgcacgccccaccggtccctagcttgcaacccccagttgatgagcgaaacccagataataggcacctttgaattgcaaggccccagcagccaaggcgatgggtcttctcctgggcaaagtttaaaactgaccccgggactgtggacctccgcctacttgcgcaagtttgctccggaagattaccacccctatgaaatcaagttctatgaggaccaatcacagcctccaaaggccgaactttcggcttgcgtcatcacccagggggcaattctggcccaattgcaagccatccaaaaatcccgccaagaatttctactgaaaaagggtaagggggtctaccttgacccccagaccggcgaggaactcaacacaaggttccctcaggatgtcccaacgacgagaaaacaagaagttgaaggtgcagccgccgcccccagaagatatggaggaagattgggacagtcaggcagaggaggcggaggaggacagtctggaggacagtctggaggaagacagtttggaggaggaaaacgaggaggcagaggaggtggaagaagtaaccgccgacaaacagttatcctcggctgcggagacaagcaacagcgctaccatctccgctccgagtcgaggaacccggcggcgtcccagcagtagatgggacgagaccggacgcttcccgaacccaaccagcgcttccaagaccggtaagaaggatcggcagggatacaagtcctggcgggggcataagaatgccatcatctcctgcttgcatgagtgcgggggcaacatatccttcacgcggcgctacttgctattccaccatggggtgaactttccgcgcaatgttttgcattactaccgtcacctccacagcccctactatagccagcaaatcccgacagtctcgacagataaagacagcggcggcgacctccaacagaaaaccagcagcggcagttagaaaatacacaacaagtgcagcaacaggaggattaaagattacagccaacgagccagcgcaaacccgagagttaagaaatcggatctttccaaccctgtatgccatcttccagcagagtcggggtcaagagcaggaactgaaaataaaaaaccgatctctgcgttcgctcaccagaagttgtttgtatcacaagagcgaagatcaacttcagcgcactctcgaggacgccgaggctctcttcaacaagtactgcgcgctgactcttaaagagtaggcagcgaccgcgcttattcaaaaaaggcgggaattacatcatcctcgacatgagtaaagaaattcccacgccttacatgtggagttatcaaccccaaatgggattggcagcaggcgcctcccaggactactccacccgcatgaattggctcagcgccgggccttctatgatttctcgagttaatgatatacgcgcctaccgaaaccaaatacttttggaacagtcagctcttaccaccacgccccgccaacaccttaatcccagaaattggcccgccgccctagtgtaccaggaaagtcccgctcccaccactgtattacttcctcgagacgcccaggccgaagtccaaatgactaatgcaggtgcgcagttagctggcggctccaccctatgtcgtcacaggcctcggcataatataaaacgcctgatgatcagaggccgaggtatccagctcaacgacgagtcggtgagctctccgcttggtctacgaccagacggaatctttcagattgccggctgcgggagatcttccttcacccctcgtcaggctgttctgactttggaaagttcgtcttcgcaaccccgctcgggcggaatcgggaccgttcaatttgtagaggagtttactccctctgtctacttcaaccccttctccggatctcctgggcactacccggacgagttcataccgaacttcgacgcgattagcgagtcagtggacggctacgattgatgtctggtgacgcggctgagctatctcggctgcgacatctagaccactgccgccgctttcgctgctttgcccgggaacttattgagttcatctacttcgaactccccaaggatcaccctcaaggtccggcccacggagtgcggattactatcgaaggcaaaatagactctcgcctgcaacgaattttctcccagcggcccgtgctgatcgagcgagaccagggaaacaccacggttagtaatcaattacggggtcattagttcatagcccatatatggagttaacttgtttattgcagcttataatggttacaaataaagcaatagcatcacaaatttcacaaataaagcatttttttcactgcattctagttgtggtttgtccaaactcatcaatgtatcttatcatgtctgctcgaagcggccggccgccccgactctagagtcgcggcctcattaggaagttcctatactttctagagaataggaacttctcagaagaactcgtcaagaaggcgatagaaggcgatgcgctgcgaatcgggagcggcgataccgtaaagcacgaggaagcggtcagcccattcgccgccaagctcttcagcaatatcacgggtagccaacgctatgtcctgatagcggtccgccacacccagccggccacagtcgatgaatccagaaaagcggccattttccaccatgatattcggcaagcaggcatcgccatgggtcacgacgagatcctcgccgtcgggcatgcgcgccttgagcctggcgaacagttcggctggcgcgagcccctgatgctcttcgtccagatcatcctgatcgacaagaccggcttccatccgagtacgtgctcgctcgatgcgatgtttcgcttggtggtcgaatgggcaggtagccggatcaagcgtatgcagccgccgcattgcatcagccatgatggatactttctcggcaggagcaaggtgagatgacaggagatcctgccccggcacttcgcccaatagcagccagtcccttcccgcttcagtgacaacgtcgagcacagctgcgcaaggaacgcccgtcgtggccagccacgatagccgcgctgcctcgtcctgcagttcattcagggcaccggacaggtcggtcttgacaaaaagaaccgggcgcccctgcgctgacagccggaacacggcggcatcagagcagccgattgcctgttgtgcccagtcatagccgaatagcctctccacccaagcggccggagaacctgcgtgcaatccatcttgttcaatggccgatcccataacaccccttgtattactgtttatgtaagcagacagttttactgttcgtgatgatatatttttatcttgtgcaatgtaacaggttgtggccatagcgggcccgggattttcctccacgtccccgcatgttagaagacttcccctgccctcggctctggaagttcctatactttctagagaataggaacttcccgccagaatgcgttcgcacagccgccagccggtcactccgttgatggttactcggaacagcagggagccgtcggggttgatcaggcgctcgtcgataattttgttgccgttccacagggtccctgttacagtgatctttttgccgtcgaacacggcgatgccttcatacggccgtccgaaatagtcgatcatgttcggcgtaaccccgtcgattaccagtgtgccatagtgcaggatcaccttaaagtgatgatcatccacagggtacaccaccttaaaaattttttcgatctggcccatttggtcgccgctcagaccttcatacgggatgatgacatggatgtcgatcttcagcccattttcaccgctcaggacaatcctttggatcggagttacggacaccccgagattctgaaacaaactggacacacctccctgttcaaggacttggtccaggttgtagccggctgtctgtcgccagtccccaacgaaatcttcgagtgtgaagaccatggatccgggcccggggttttcttcaacgtctccagcctgcttcagcaggctgaagttagtagctccgcttcctcgagctcgagatctggcgaaggcgatgggggtcttgaaggcgtgctggtactccacgatgcccagctcggtgttgctgtgcagctcctccacgcggcggaaggcgaacatggggcccccgttctgcaggatgctggggtggatggcgctcttgaagtgcatgtggctgtccaccacgaagctgtagtagccgccgtcgcgcaggctgaaggtgcgggcgaagctgcccaccagcacgttatcgcccatggggtgcaggtgctccacggtggcgttgctgcggatgatcttgtcggtgaagatcacgctgtcctcggggaagccggtgcccaccaccttgaagtcgccgatcacgcggccggcctcgtagcggtagctgaagctcacgtgcagcacgccgccgtcctcgtacttctcgatgcgggtgttggtgtagccgccgttgttgatggcgtgcaggaaggggttctcgtagccgctggggtaggtgccgaagtggtagaagccgtagcccatcacgtggctcagcaggtaggggctgaaggtcagggcgcctttggtgctcttcatcttgttggtcatgcggccctgctcgggggtgccctctccgccgcccaccagctcgaactccacgccgttcagggtgccggtgatgcggcactcgatcttcatggcgggcatggtggcgaccggtagcgctagcggcttcggtaccacgcgttcgctcgaattaatcaattctttgccaaaatgatgagacagcacaataaccagcacgttgcccaggagctgtaggaaaaagaagaaggcatgaacatggttagcagaggctctagagccgccggtcacacgccagaagccgaaccccgccctgccccgtcccccccgaaggcagccgtccccccgcggacagccccgaggctggagagggagaaggggacggcggcgcggcgacgcacgaaggccctccccgcccatttccttcctgccggggccctcccggagcccctcaaggctttcacgcagccacagaaaagaaacaagccgtcattaaaccaagcgctaattacagcccggaggagaagggccgtcccgcccgctcacctgtgggagtaacgcggtcagtcagagccggggcgggcggcgcgaggcggcgcggagcggggcacggggcgaaggcaacgcagcgactcccgcccgccgcgcgcttcgctttttatagggccgccgccgccgccgcctcgccataaaaggaaactttcggagcgcgccgctctgattggctgccgccgcacctctccgcctcgccccgccccgcccctcgccccgccccgccccgcctggcgcgcgccccccccccccccccgcccccatcgctgcacaaaataattaaaaaataaataaatacaaaattgggggtggggaggggggggagatggggagagtgaagcagaacgtggggctcacctcgaccatggtaatagcgatgactaatacgtagatgtactgccaagtaggaaagtcccataaggtcatgtactgggcataatgccaggcgggccatttaccgtcattgacgtcaatagggggcgtacttggcatatgatacacttgatgtactgccaagtgggcagtttaccgtaaatactccacccattgacgtcaatggaaagtccctattggcgttactatgggaacatacgtcattattgacgtcaatgggcgggggtcgttgggcggtcagccaggcgggccatttaccgtaagttatgtaacgcggaacaacaacaattgcattcattttatgtttcaggttcagggggaggtgtggtcctgcgattccatcgagtgcacctacaccctgctgaagaccctatgcggcctaagagacctgctaccaatgaattaaaaaaaaatgattaataaaaaatcacttacttgaaatcagcaataaggtctctgttgaaattttctcccagcagcacctcacttccctcttcccaactctggtattctaaaccccgttcagcggcatactttctccatactttaaaggggatgtcaaattttagctcctctcctgtacccacaatcttcatgtctttcttcccagatgaccaagagagtccggctcagtgactccttcaaccctgtctacccctatgaagatgaaagcacctcccaacacccctttataaacccagggtttatttccccaaatggcttcacacaaagcccagacggagttcttactttaaaatgtttaaccccactaacaaccacaggcggatctctacagctaaaagtgggagggggacttacagtggatgacactgatggtaccttacaagaaaacatacgtgctacagcacccattactaaaaataatcactctgtagaactatccattggaaatggattagaaactcaaaacaataaactatgtgccaaattgggaaatgggttaaaatttaacaacggtgacatttgtataaaggatagtattaacaccttatggactggaataaaccctccacctaactgtcaaattgtggaaaacactaatacaaatgatggcaaacttactttagtattagtaaaaaatggagggcttgttaatggctacgtgtctctagttggtgtatcagacactgtgaaccaaatgttcacacaaaagacagcaaacatccaattaagattatattttgactcttctggaaatctattaactgaggaatcagacttaaaaattccacttaaaaataaatcttctacagcgaccagtgaaactgtagccagcagcaaagcctttatgccaagtactacagcttatcccttcaacaccactactagggatagtgaaaactacattcatggaatatgttactacatgactagttatgatagaagtctatttcccttgaacatttctataatgctaaacagccgtatgatttcttccaatgttgcctatgccatacaatttgaatggaatctaaatgcaagtgaatctccagaaagcaacatagctacgctgaccacatccccctttttcttttcttacattacagaagacgacaactaaaataaagtttaagtgtttttatttaaaatcacaaaattcgagtagttattttgcctccaccttcccatttgacagaatacacagtcctttctccccggctggccttaaaaagcatcatatcatgggtaacagacatattcttaggtgttatattccacacggtttcctgtcgagccaaacgctcatcagtgatattaataaactccccgggcagctcacttaagttcatgtcgctgtccagctgctgagccacaggctgctgtccaacttgcggttgcttaacgggcggcgaaggagaagtccacgcctacatgggggtagagtcataatcgtgcatcaggatagggcggtggtgctgcagcagcgcgcgaataaactgctgccgccgccgctccgtcctgcaggaatacaacatggcagtggtctcctcagcgatgattcgcaccgcccgcagcataaggcgccttgtcctccgggcacagcagcgcaccctgatctcacttaaatcagcacagtaactgcagcacagcaccacaatattgttcaaaatcccacagtgcaaggcgctgtatccaaagctcatggcggggaccacagaacccacgtggccatcataccacaagcgcaggtagattaagtggcgacccctcataaacacgctggacataaacattacctcttttggcatgttgtaattcaccacctcccggtaccatataaacctctgattaaacatggcgccatccaccaccatcctaaaccagctggccaaaacctgcccgccggctatacactgcagggaaccgggactggaacaatgacagtggagagcccaggactcgtaaccatggatcatcatgctcgtcatgatatcaatgttggcacaacacaggcacacgtgcatacacttcctcaggattacaagctcctcccgcgttagaaccatatcccagggaacaacccattcctgaatcagcgtaaatcccacactgcagggaagacctcgcacgtaactcacgttgtgcattgtcaaagtgttacattcgggcagcagcggatgatcctccagtatggtagcgcgggtttctgtctcaaaaggaggtagacgatccctactgtacggagtgcgccgagacaaccgagatcgtgttggtcgtagtgtcatgccaaatggaacgccggacgtagtcattctcgtattttgtatagcaaaacgcggccctggcagaacacactcttcttcgccttctatcctgccgcttagcgtgttccgtgtgatagttcaagtacagccacactcttaagttggtcaaaagaatgctggcttcagttgtaatcaaaactccatcgcatctaattgttctgaggaaatcatccacggtagcatatgcaaatcccaaccaagcaatgcaactggattgcgtttcaagcaggagaggagagggaagagacggaagaaccatgttaatttttattccaaacgatctcgcagtacttcaaattgtagatcgcgcagatggcatctctcgcccccactgtgttggtgaaaaagcacagctaaatcaaaagaaatgcgattttcaaggtgctcaacggtggcttccaacaaagcctccacgcgcacatccaagaacaaaagaataccaaaagaaggagcattttctaactcctcaatcatcatattacattcctgcaccattcccagataattttcagctttccagccttgaattattcgtgtcagttcttgtggtaaatccaatccacacattacaaacaggtcccggagggcgccctccaccaccattcttaaacacaccctcataatgacaaaatatcttgctcctgtgtcacctgtagcgaattgagaatggcaacatcaattgacatgcccttggctctaagttcttctttaagttctagttgtaaaaactctctcatattatcaccaaactgcttagccagaagccccccgggaacaagagcaggggacgctacagtgcagtacaagcgcagacctccccaattggctccagcaaaaacaagattggaataagcatattgggaaccaccagtaatatcatcgaagttgctggaaatataatcaggcagagtttcttgtagaaattgaataaaagaaaaatttgccaaaaaaacattcaaaacctctgggatgcaaatgcaataggttaccgcgctgcgctccaacattgttagttttgaattagtctgcaaaaataaaaaaaaaacaagcgtcatatcatagtagcctgacgaacaggtggataaatcagtctttccatcacaagacaagccacagggtctccagctcgaccctcgtaaaacctgtcatcgtgattaaacaacagcaccgaaagttcctcgcggtgaccagcatgaataagtcttgatgaagcatacaatccagacatgttagcatcagttaaggagaaaaaacagccaacatagcctttgggtataattatgcttaatcgtaagtatagcaaagccacccctcgcggatacaaagtaaaaggcacaggagaataaaaaatataattatttctctgctgctgtttaggcaacgtcgcccccggtccctctaaatacacatacaaagcctcatcagccatggcttaccagagaaagtacagcgggcacacaaaccacaagctctaaagtcactctccaacctctccacaatatatatacacaagccctaaactgacgtaatgggactaaagtgtaaaaaatcccgccaaacccaacacacaccccgaaactgcgtcaccagggaaaagtacagtttcacttccgcaatcccaacaagcgtcacttcctctttctcacggtacgtcacatcccattaacttacaacgtcattttcccacggccgcgccgccccttttaaccgttaaccccacagccaatcaccacacggcccacactttttaaaatcacctcatttacatattggcaccattccatctataaggtatattattgatgatggccaagctatttaggtgacactatagaatactcaagctatgcatcaagcttggtaccgagctcggatccactagtaacggccgccagtgtgctggaattcgcccttgtttaaacgcgatcgcttgagatcgttttggtctgcgcgtaatctcttgctctgaaaacgaaaaaaccgccttgcagggcggtttttcgaaggttctctgagctaccaactctttgaaccgaggtaactggcttggaggagcgcagtcaccaaaacttgtcctttcagtttagccttaaccggcgcatgacttcaagactaactcctctaaatcaattaccagtggctgctgccagtggtgcttttgcatgtctttccgggttggactcaagacgatagttaccggataaggcgcagcggtcggactgaacggggggttcgtgcatacagtccagcttggagcgaactgcctacccggaactgagtgtcaggcgtggaatgagacaaacgcggccataacagcggaatgacaccggtaaaccgaaaggcaggaacaggagagcgcacgagggagccgccagggggaaacgcctggtatctttatagtcctgtcgggtttcgccaccactgatttgagcgtcagatttcgtgatgcttgtcaggggggcggagcctatggaaaaacggctttgccgcggccctctcacttccctgttaagtatcttcctggcatcttccaggaaatctccgccccgttcgtaagccatttccgctcgccgcagtcgaacgaccgagcgtagcgagtcagtgagcgaggaagcggaatatatcctgtatcacatattctgctgacgcaccggtgcagccttttttctcctgccacatgaagcacttcactgacaccctcatcagtgccaacatagtaagccagtatacactccgctagcgcgatcgcttaattaatttaaatcctgcagggtttaaacggccggcctagggataacagggtaatcgtaactataacggtcctaaggtagcgaatgatgtccggcggtgcttttgccgttacgcaccaccccgtcagtagctgaacaggagggacagctgatagaaacagaagccactggagcacctcaaaaacaccatcatacactaaatcagtaagttggcagcatcacccgacgcactttgcgccgaataaatacctgtgacggaagatcacttcgcagaataaataaatcctggtgtccctgttgataccgggaagccctgggccaacttttggcgaaaatgagacgttgatcggcacgtaagaggttccaactttcaccataatgaaataagatcactaccgggcgtattttttgagttatcgagattttcaggagctaaggaagctaaaatggagaaaaaaatcactggatataccaccgttgatatatcccaatggcatcgtaaagaacattttgaggcatttcagtcagttgctcaatgtacctataaccagaccgttcagctggatattacggcctttttaaagaccgtaaagaaaaataagcacaagttttatccggcctttattcacattcttgcccgcctgatgaatgctcatccggaattccgtatggcaatgaaagacggtgagctggtgatatgggatagtgttcacccttgttacaccgttttccatgagcaaactgaaacgttttcatcgctctggagtgaataccacgacgatttccggcagtttctacacatatattcgcaagatgtggcgtgttacggtgaaaacctggcctatttccctaaagggtttattgagaatatgtttttcgtctcagccaatccctgggtgagtttcaccagttttgatttaaacgtggccaatatggacaacttcttcgcccccgttttcaccatgggcaaatattatacgcaaggcgacaaggtgctgatgccgctggcgattcaggttcatcatgccgtctgtgatggcttccatgtcggcagaatgcttaatgaattacaacagtactgcgatgagtggcagggcggggcgtaacctgcaggttaattaaggaagggcgaattctgcagatatccatcacactggcggccgctcgagcatgcatctagagggcccaattcgccctatagtgagtcgtattacaattcactggcc

SEQ ID NO: 178 - DNA, 33055 bp, Artificial Sequence
  pHCA-Dual2-FI-globin-mgmtGFP
ggccgaaggattacatgagcttagaaatgtaattagcatagtgtgtggcatagtgtagataccaaataaatatgatctctccttctactcttgaaaatgcaaacacattcttggtggtcctaaaatagcctgtaacatggtttactcagcagcatttgctattcaaggcagatctgcctttagtcattggctgcgctcctgaacagctgtgtgaaaggctaacttttgtaaaccaaatcaaaataaaatgcagcaaaaatttgtcactgaaaggaaatcctcagtatatccttttatgaaatgaaagatccctcatccaaacttaacttttttaaaagtgcgcatttggagatatagccctttcttatgaatcctaattcaattttggccataaacacacgttgatgttccccaccccaaagcacatagcaacaagagtaggttctatattgaaaataatgacaatttaaaaacatgtacttatttcactgtatgtggacagtgtctatgattgcatcatgaagtgtcatataaccatgtacgtgtacatgagagagagatagagagagaagtggtagggtggtggtggtagaggggatggcgatagtaatcatggtaatggtagaggtgatggaggtggtaatgacggaggtaagggtggtagtgatgatggtggtggtggtaatggtggtggatgtggtggtggcaattgggatggtgggatggtggtagccatggtgatggtggtaatggtgttgatttaaagggtggtggtagtgaaggtgagggtagtggtggtggaggtggtggtgctggtagcaatagtgatggtggtgatggtgttgatgagggtgttgggatcagggtgagttcccacagtatatttcattcttgttgtaccactctgtcaacagcaccactgactgggacagaggaagaaggcacactctgaatgtgttattaacagaaacctcaaaacagtctgtctccttgtagtcattcaaaattatctttttcttacctggaaaactgaaactgaattaccgggaaaaacacaggagatttttgtttgttaatatgctgccaataaagtaattttatgtcaaatttaactacaggaaagggcaaggcattttctaagttccttagatgtcatgtggctaaaaaaaacaaaaggatggacagcagttagatactgtacacttagctgtttgaagccatatattcagaaagcagatgttgggagttggtgtttgaggactgatttcctggaggtattttatataggccaagttcattgttctaaactctaagggcttgacttgagggaggaaaagaggcaagaacatgtttagttttgctgacagcatcacatgggcagccctaaggctagacaactttagggcctgaagcttattctaggaaagaagcacctacagagtggcactgggctcccctccactatagagatgaagtcatatgacagtaaagggcaggcagggctgcctagggggcccagaactgacacttccattagaatgagcacaggccagggagagaagtggggaaccagagagaaggagctggaattcctttctctccatacataaatgcctgcagagtcccatttcagaatccggcagacaaagccaccaatgtgatccccatgaccttataaacattcattaaaatgcatttcaaggcatgtgatggcctccccaccccctagataatgagaaaacaaaggtttctcttctgatagagacaagttcagctctgaagtcaacattatttctggttctgtctgaacaatgacatatggcaactcttccctttctatagttctagtccagaatgacaaaaaaggggaaaaatttcttagagaaggtagagattatacgaatacagtccatgaaatgagcataaggagaataaagaatataacttatccaaagaagtctggcaggctgttataaatgcttgattttggacactgtagttggaggtttaacatggacaccaataaaaaggtcagcaaagggtatgcactgttcctattgggcaagaagataggaggtcaaaggtaaccaggaaagataaactcagggagacttattttccctccagagggcactgggcttgtaggccctgggcaaaattgtcaaaaaggtgaaaatcgcctgtggtttatttagtctgctctttcttcactagtgcctcaccagttcagttcaggccaatttgctagctaccacatttgtagaggttttacttgctttaaaaaacctcccacacctccccctgaacctgaaacataaaatgaatgcaattgttgttgttaacttgtttattgcagcttataatggttacaaataaagcaatagcatcacaaatttcacaaataaagcatttttttcactgcattctagttgtggtttgtccaaactcatcaatgtatcttatcatgtctgaagctttctaggtattgaataagaaaaatgaagttaaggtggttgatggtaacactatgctaataactgcagagccagaagcaccataagggacatgataagggagccagcagacctctgatctcttcctgaatgctaatcttaaacatcctgaggaagaatgggacttccatttggggtgggcctatgatagggtaataagacagtagtgaatatcaagctacaaaaagccccctttcaaattcttctcagtcctaacttttcatactaagcccagtccttccaaagcagactgtgaaagagtgatagttccgggagactagcactgcagattccgggtcactgtgagtgggggaggcagggaagaagggctcacaggacagtcaaaccatgccccctgtttttccttcttcaagtagacctctataagacaacagagacaactaaggctgagtggccaggcgaggagaaaccatctcgccgtaaaacatggaaggaacacttcaggggaaaggtggtatctctaagcaagagaactgagtggagtcaaggctgagagatgcaggataagcaaatgggtagtgaaaagacattcatgaggacagctaaaacaataagtaatgtaaaatacagcatagcaaaactttaacctccaaatcaagcctctacttgaatccttttctgagggatgaataaggcataggcatcaggggctgttgccaatgtgcattagctgtttgcagcctcaccttctttcatggagtttaagatatagtgtattttcccaaggtttgaactagctcttcatttctttatgttttaaatgcactgacctcccacattccctttttagtaaaatattcagaaataatttaaatacatcattgcaatgaaaataaatgttttttattaggcagaatccagatgctcaaggcccttcataatatcccccagtttagtagttggacttagggaacaaaggaacctttaatagaaattggacagcaagaaagcgagcttagtgatacttgtgggccagggcattagccacaccagccaccactttctgataggcagcctgcactggtggggtggcggccgccctaggattatggcactggtagaattcactacttatggcactggtagaattcactacttatggcactggtagaattcactacttatggcactggtagaattcactatcgttgtgcttgatctaaccatgtttcattgtgcttgatctaaccatgtttcattgtgcttgatctaaccatgtttcattgtgcttgatctaaccatgtatcgcccgggggcggccgcacacaaaaaaccaacacacagatctaatgaaaataaagatcttttattgaattcttagctggcctccacctttctcttcttcttggggctgtcgcctcccagctgagacaggtcgatccgtgtctcgtacaggccggtgatgctctggtggatcagggtggcgtccagcacctctttggtgctggtgtacctcttccggtcgatggtggtgtcaaagtacttgaaggcggcaggggctcccagattggtcagggtaaacaggtggatgatattctcggcctgctctctgatgggcttatcccggtgcttgttgtaggcggacagcactttgtccagattagcgtcggccaggatcactctcttggagaactcgctgatctgctcgatgatctcgtccaggtagtgcttgtgctgttccacaaacagctgtttctgctcattatcctcgggggagcccttcagcttctcatagtggctggccaggtacaggaagttcacatatttggagggcagggccagttcgtttcccttctgcagttcgccggcagaggccagcattctcttccggccgttttccagctcgaacagggagtacttaggcagcttgatgatcaggtcctttttcacttctttgtagcccttggcttccagaaagtcgatgggattcttctcgaagctgcttctttccatgatggtgatccccagcagctctttcacactcttcagtttcttggacttgcccttttccactttggccaccaccagcacagaataggccacggtggggctgtcgaagccgccgtacttcttagggtcccagtccttctttctggcgatcagcttatcgctgttcctcttgggcaggatagactctttgctgaagccgcctgtctgcacctcggtctttttcacgatattcacttggggcatgctcagcactttccgcacggtggcaaaatcccggcccttatcccacacgatctccccggtttcgccgtttgtctcgatcagaggccgcttccggatctcgccgttggccagggtaatctcggtcttgaaaaagttcatgatgttgctgtagaagaagtacttggcggtagccttgccgatttcctgctcgctcttggcgatcatcttccgcacgtcgtacaccttgtagtcgccgtacacgaactcgctttccagcttagggtactttttgatcagggcggttcccacgacggcgttcaggtaggcgtcgtgggcgtggtggtagttgttgatctcgcgcactttgtaaaactggaaatccttccggaaatcggacaccagcttggacttcagggtgatcactttcacttcccggatcagcttgtcattctcgtcgtacttagtgttcatccgggagtccaggatctgtgccacgtgctttgtgatctgccgggtttccaccagctgtctcttgatgaagccggccttatccagttcgctcaggccgcctctctcggccttggtcagattgtcgaactttctctgggtaatcagcttggcgttcagcagctgccgccagtagttcttcatcttcttcacgacctcttcggagggcacgttgtcgctcttgccccggttcttgtcgcttctggtcagcaccttgttgtcgatggagtcgtccttcagaaagctctgaggcacgatatggtccacatcgtagtcggacagccggttgatgtccagttcctggtccacgtacatatcccgcccattctgcaggtagtacaggtacagcttctcgttctgcagctgggtgttttccacggggtgttctttcaggatctggctgcccagctctttgatgccctcttcgatccgcttcattctctcgcggctgttcttctgtcccttctgggtggtctggttctctctggccatttcgatcacgatgttctcgggcttgtgccggcccatcactttcacgagctcgtccaccaccttcactgtctgcaggatgcccttcttaatggcggggctgccggccagattggcaatgtgctcgtgcaggctatcgccctggccggacacctgggctttctggatgtcctctttaaaggtcaggctgtcgtcgtggatcagctgcatgaagtttctgttggcgaagccgtcggacttcaggaaatccaggattgtcttgccggactgcttgtcccggatgccgttgatcagcttccggctcagcctgccccagccggtgtatctccgccgcttcagctgcttcatcactttgtcgtcgaacaggtgggcataggttttcagccgttcctcgatcatctctctgtcctcaaacagtgtcagggtcagcacgatatcttccagaatgtcctcgttttcctcattgtccaggaagtccttgtccttgataattttcagcagatcgtggtatgtgcccagggaggcgttgaaccgatcttccacgccggagatttccacggagtcgaagcactcgattttcttgaagtagtcctctttcagctgcttcacggtcactttccggttggtcttgaacagcaggtccacgatggcctttttctgctcgccgctcaggaaggcgggctttctcattccctcggtcacgtatttcactttggtcagctcgttatacacggtgaagtactcgtacagcaggctgtgcttgggcagcaccttctcgttgggcaggttcttatcgaagttggtcatccgctcgatgaagctctgggcggaagcgcccttgtccaccacttcctcgaagttccagggggtgatggtttcctcgctctttctggtcatccaggcgaatctgctgtttcccctggccagagggcccacgtagtaggggatgcggaaggtcaggatcttctcgatcttttcccggttgtccttcaggaatgggtaaaaatcttcctgccgccgcagaatggcgtgcagctctcccaggtggatctggtgggggatgctgccgttgtcgaaggtccgctgcttccgcagcaggtcctctctgttcagcttcacgagcagttcctcggtgccgtccatcttttccaggatgggcttgatgaacttgtagaactcttcctggctggctccgccgtcaatgtagccggcgtagccgttcttgctctggtcgaagaaaatctctttgtacttctcaggcagctgctgccgcacgagagctttcagcagggtcaggtcctggtggtgctcgtcgtatctcttgatcatagaggcgctcaggggggccttggtgatctcggtgttcactctcaggatgtcgctcagcaggatggcgtcggacaggttcttggcggccagaaacaggtcggcgtactggtcgccgatctgggccagcaggttgtccaggtcgtcgtcgtaggtgtccttgctcagctgcagtttggcatcctcggccaggtcgaagttgctcttgaagttgggggtcaggcccaggctcagggcaatcaggttgccgaacaggccattcttcttctcgccgggcagctgggcgatcagattttccagccgtctgctcttgctcagtctggcagacaggatggccttggcgtccacgccgctggcgttgatggggttttcctcgaacagctggttgtaggtctgcaccagctggatgaacagcttgtccacgtcgctgttgtcggggttcaggtcgccctcgatcaggaagtggccccggaacttgatcatgtgggccagggccagatagatcagccgcaggtcggccttgtcggtgctgtccaccagtttctttctcaggtggtagatggtggggtacttctcgtggtaggccacctcgtccacgatgttgccgaagatggggtgccgctcgtgcttcttatcctcttccaccaggaaggactcttccagtctgtggaagaagctgtcgtccaccttggccatctcgttgctgaagatctcttgcagatagcagatccggttcttccgtctggtgtatcttcttctggcggttctcttcagccgggtggcctcggctgtttcgccgctgtcgaacagcagggctccgatcaggttcttcttgatgctgtgccggtcggtgttgcccagcaccttgaatttcttgctgggcaccttgtactcgtcggtgatcacggcccagcccacagagttggtgccgatgtccaggccgatgctgtacttcttgtcggacgcttcgaccttgcgctttttcttcggcgaagcgtaatctggaacatcgtatgggtacatggtggccctaggatcgattactagctcacgacacctgaaatggaagaaaaaaactttgaaccactgtctgaggcttgagaatgaaccaagatccaaactcaaaaagggcaaattccaaggagaattacatcaagtgccaagctggcctaacttcagtctccacccactcagtgtggggaaactccatcgcataaaacccctccccccaacctaaagacgacgtactccaaaagctcgagaactaatcgaggtgcctggacggcgcccggtactccgtggagtcacatgaagcgacggctgaggacggaaaggcccttttcctttgtgtgggtgactcacccgcccgctctcccgagcgccgcgtcctccattttgagctccctgcagcagggccgggaagcggccatctttccgctcacgcaactggtgccgaccgggccagccttgccgcccagggcggggcgatacacggcggcgcgaggccaggcaccagagcaggccggcgagcttgagactacccccgtccgattctcggtggccgcgctcgcaggccccgcctcgccgaacatgtgcgctgggacgcacgggccccgtcgccgcccgcggccccaaaaaccgaaataccagtgtgcagatcttggcccgcatttacaagactatcttgccagaaaaaaagcgtcgcagcaggtcatcaaaaattttaaatggctagagacttatcgaaagcagcgagacaggcgcgaaggtgccaccagattcgcacgcggcggccccagcgcccaggccaggcctcaactcaagcacgaggcgaaggggctccttaagcgcaaggcctcgaactctcccacccacttccaacccgaagctcgggatcaagaatcacgtactgcagccaggggcgtggaagtaattcaaggcacgcaagggccataacccgtaaagaggccaggcccgcgggaaccacacacggcacttacctgtgttctggcggcaaacccgttgcgaaaaagaacgttcacggcgactactgcacttatatacggttctcccccaccctcgggaaaaaggcggagccagtacacgacatcactttcccagtttaccccgcgccaccttctctaggcaccggttcaattgccgacccctccccccaacttctcggggactgtgggcgatgtgcgctctgcccactgacgggcaccggagcctcacgcatgctcttctccacctcagtgatgacgagagcgggcgggtgagggggcgggaacgcagcgatctctgggttctacgttagtgggagtttaacgacggtccctgggattccccaaggcaggggcgagtccttttgtatgaattactcaaatcgattaggatccggcgcgcccaccgcggaaaaaaagcaccgactcggtgccactttttcaagttgataacggactagccttattttaacttgctatttctagctctaaaacgtgataaaagcaactgttagcggtgtttcgtcctttccacaagatatataaagccaagaaatcgaaatactttcaagttacgataagcatatgatagtccattttaaaacataattttaaaactgcaaactacccaagaaattattactttctacgtcacgtattttgtactaatatctttgtgtttacagtcaaattaattccaattatctctctaacagccttgtatcgtatatgcaaatatgaaggaatcatgggaaataggccctcggcgcgcccaccgcggaaaaaaagcaccgactcggtgccactttttcaagttgataacggactagccttattttaacttgctatttctagctctaaaactgaccaatagccttgacaagcggtgtttcgtcctttccacaagatatataaagccaagaaatcgaaatactttcaagttacggtaagcatatgatagtccattttaaaacataattttaaaactgcaaactacccaagaaattattactttctacgtcacgtattttgtactaatatctttgtgtttacagtcaaattaattctaattatctctctaacagccttgtatcgtatatgcaaatatgaaggaatcatgggaaataggccctcggatccttaattgctagcgaggcctgtactctgttttcacaggaagaaatcctcacccagtcttccccaaacacattcccaggttctgtcattagtgggatagagatgattactgtggggagaagagaaacatctggatggatttggtgaggttgatctatagaggaagtaggtgctgcctgaggtagctgtaatagaagctaaaggtcaaaggagagggccctgtcccaatccagatgactccacttctgctggacccaggttcacaagcttaatctacatttcacctaaatttggctaacaagcccaaaatcacacaggcaaagggagaagtggaggcagaaccgaggttggaggccaccagggccaccgggcagagatcatttaagcccaaccttctcacttctccctgggctctgcctctcttaaaggaccttgtggtgtgacctcttgtaggtccctttcacactcggggcctcagtttccccactgtaaagtgaatgggtcccagctttggtaagcttatgcttacctgatgctttcttcctgggctgctcttgtagagaaaagataaatcttcttcctccatccacgagggcttctttccctgggggtgagagtaggctgaggagagccacttgcacacactcttaaagaaagtattacctgcaccagctcagtgagaggcacagatcagactgttacttgaatcaaattatgagcctccccaaatatatctatgacatttaaataggggattacttgaacatagactttgggatccggtgtggagtgcaggagactagcaaagtgaatcctgagagtagcaggtctgcacctgttggatcgagaaaggcggcctacaattctggtcaaatgagctgtgcttattgacatattctattagagagtactaccaggtcaccagtcaccagaaaggctgccagctctccaaccacctccagggaactatcctgaatggggccttaacaagcctaagagagggttggtttgggtcccaagccaatatttgctctgctttatgtcagtcatatggaacccaaaccaaccctctcctatgtgcctcaccagtcggtgcagggatcccaatttcaagtttggttttttatggtcaaagtccagcatagattaaatgaaggggtgtgatgatggtgttaaaagagaactccagaccagtttaactcttggacacacatcccatctcaccatggtgcttccaaccttccagagatgatgggctcctattttctgatgacaaagccctccacaggattgctgcctggccatcagggagtgcctctgtaactgaggctgagatcccactttcagtcctccagctgtggcccatccctgctccgcccaccgggtatggcctgtcctaggctcttaggtatggctgcattgtgaaatgatggctacagagctggcatctcctgtagtctggttcatctagtgcactacctcatagttaaaagaaatctgtttaagccactgagggtggctcctagtgccaactccaagaacaggaagcttcccttttttgggaggaggggcagatggtaacatggatcgtccaggtcaatgggagcagggcaaccacagtaagtactggacaacaacacaaaactccatgtgtggcttccatcgagtccctctccaattggtttggtcttctccgtcccatgcagcactttagcaaggggcctggctgaaggctatgaattgtgtggagcctcctcattgcagtctccaaccatctgatgctgggaaaatgtcaccaggatgcagccatgccgtgtggccaatgaaccgagaaaacaccccttttctagaatgctctaaagaggcagaataatccagaggtgaggaaggaaatactccaccagagacccaggcagttcctacaaaagccagactttccttcacctagggagtgacaagaccagtggaaaacactctcaagcagtaacccccaaatgctctgcaagccagtggcgtccagataccgcacaagcgagtgggctgtctaatcccatcatcatgatgtaaatatctctaggctgccccgggctgtgcctgaccctgtcttcagctttccacacctccacctacagcccatgcacagaaggaccacccaggaatgctgcaagtgtggcacctccagggccacccagggagaaggagggcagctatgctggtggctccaggcccatttggcgggtggtaccttcacaccacaaagcccaaactgaggccccagatttggctgatgagggcatattggacaggggtcacttatgctcttccccattgccacctggcctctggctacctggacttggctacctgtggatcctctcacaggtgccaccatcttggctgagtctccagatgcgaggtccctgaggcagtggcaggcttctcgctaatgctgatgggattaggaatgggataggtggggagggccctggactgggccctgatgagccaagtgggtttttagaggggctactggtacatttcagggacaggacatctggtagagctaagctggggcaataaggagccactgctaatctgagagctagaaacaatcagcttctgggtcattattaattagggtagtttgggctgtgtggaagtcacgtactatatggggtagccacagctctctctacagataatctctaagacttctgattgggaccgtgtgaatgcagtagcaatatctcttcttactgccaggccctgccagtcctgcctccacgccctggctggccccccttatgatctgacccatgccaggctgccatagtatgttacttctgcattagcactccttgggacctgcctctccactgtccctcagactttaaagaactatacaaacccaaggggctcttcccaagagaattgatatgacttgaggtgattccatttctggaagtagtcactccattttctgcctcactctttcagtgcttcacagagcaggttcgattaagcacacagattaattaagcacacagattaatcgtaactataacggtcctaaggtagcgaaagcttgcatgcctgcaggtcgactctagaggatcaaacctagccaccgcggtggcggccggctagccggctagccggctagccctagaactagtaacggccgccagtgtgctggaattcggcttgtaaggtaccggtgaagttcctatactttctagagaataggaacttcggaataggaacttctacctagatgcatgctcgagcggcccctacagttgaagtcggaagtttacatacacttaagttggagtcattaaaactcgtttttcaactactccacaaatttcttgttaacaaacaatagttttggcaagtcagttaggacatctactttgtgcatgacacaagtcatttttccaacaattgtttacagacagattatttcacttataattcactgtatcacaattccagtgggtcagaagtttacatacactaagttgactgtgcctttaaacagcttggaaaattccagaaaatgatgtcatggctttagaagcttctgatagactaattgacatcatttgagtcaattggaggtgtacctgtggatgtatttcaaggaattctgtggaatgtgtgtcagttagggtgtggaaagtccccaggctccccagcaggcagaagtatgcaaagcatgcatatcgatactagtttataagatctcgagctagggtaccgtcaaggctgcagtgagacatgatcttgccactgcactccagcctggacagcagagtgaaaccttgcctcacgaaacagaatacaaaaacaaacaaacaaaaaactgctccgcaatgcgcttccttgatgctctaccacataggtctgggtactttgtacacattatctcattgctgttcataattgttagattaattttgtaatattgatattattcctagaaagctgaggcctcaagatgataacttttattttctggacttgtaatagctttctcttgtattcaccatgttgtaactttcttagagtagtaacaatataaagttattgtgagtttttgcaaacacagcaaacacaacgacccatatagacattgatgtgaaattgtctattgtcaatttatgggaaaacaagtatgtactttttctactaagccattgaaacaggaataacagaacaagattgaaagaatacattttccgaaattacttgagtattatacaaagacaagcacgtggacctgggaggagggttattgtccatgactggtgtgtggagacaaatgcaggtttataatagatgggatggcatctagcgcaatgactttgccatcacttttagagagctcttggggaccccagtacacaagaggggacgcagggtatatgtagacatctcattctttttcttagtgtgagaataagaatagccatgacctgagtttatagacaatgagcccttttctctctcccactcagcagctatgagatggcttgccctgcctctctactaggctgactcactccaaggcccagcaatgggcagggctctgtcagggctttgatagcactatctgcagagccagggccgagaaggggtggactccagagactctccctcccattcccgagcagggtttgcttatttatgcatttaaatgatatatttattttaaaagaaataacaggagactgcccagccctggctgtgacatggaaactatgtagaatattttgggttccatttttttttccttctttcagttagaggaaaaggggctcaggatccacttgcccagtgttcttccttagttcctaccttcgaccttgatcctcctttatcttcctgaaccctgctgagatgatctatgtggggagaatggcttctttgagaaacatcttcttcgttagtggcctgcccctcattcccactttaatatccagaatcactataagaagaatataataagaggaataactcttattataggtaagggaaaattaagaggcatacgtgatgggatgagtaagagaggagagggaaggattaatggacgataaaatctactactatttgttgagaccttttatagtctaatcaattttgctattgttttccatcctcacgctaactccataaaaaaacactattattatctttattttgccatgacaagactgagctcagaagagtcaagcatttgcctaaggtcggacatgtcagaggcagtgccagacctatgtgagactctgcagctactgctcatgggccctgtgctgcactgatgaggaggatcagatggatggggcaatgaagcaaaggaatcattctgtggataaaggagacagccatgaagaagtctatgactgtaaatttgggagcaggagtctctaaggacttggatttcaaggaattttgactcagcaaacacaagaccctcacggtgactttgcgagctggtgtgccagatgtgtctatcagaggttccagggagggtggggtggggtcagggctggccaccagctatcagggcccagatgggttataggctggcaggctcagataggtggttaggtcaggttggtggtgctgggtggagtccatgactcccaggagccaggagagatagaccatgagtagagggcagacatgggaaaggtgggggaggcacagcatagcagcatttttcattctactactacatgggactgctcccctatacccccagctaggggcaagtgccttgactcctatgttttcaggatcatcatctataaagtaagagtaataattgtgtctatctcatagggttattatgaggatcaaaggagatgcacactctctggaccagtggcctaacagttcaggacagagctatgggcttcctatgtatgggtcagtggtctcaatgtagcaggcaagttccagaagatagcatcaaccactgttagagatatactgccagtctcagagcctgatgttaatttagcaatgggctgggaccctcctccagtagaaccttctaaccagctgctgcagtcaaagtcgaatgcagctggttagactttttttaatgaaagcttgcatgcagcactttgggaggctgaggtgggtggactgcttggagctcaggagttcaagaccatcttggacaacatggtgataccctgcctctacaaaaagtacaaaaattagcctggcatggtggtgtgcacctgtaatcccagctattagggtggctgaggcaggagaattgcttgaacccgggaggcggaggttgcagtgagctgagatcgtgccactgcactccagcctgggggacagagcacattataattaactgttattttttacttggactcttgtggggaataagatacatgttttattcttatttatgattcaagcactgaaaatagtgtttagcatccagcaggtgcttcaaaaccatttgctgaatgattactatactttttacaagctcagctccctctatcccttccagcatcctcatctctgattaaataagcttcagtttttccttagttcctgttacatttctgtgtgtctccattagtgacctcccatagtccaagcatgagcagttctggccaggcccctgtcggggtcagtgccccacccccgccttctggttctgtgtaaccttctaagcaaaccttctggctcaagcacagcaatgctgagtcatgatgagtcatgctgaggcttagggtgtgtgcccagatgttctcagcctagagtgatgactcctatctgggtccccagcaggatgcttacagggcagatggcaaaaaaaaggagaagctgaccacctgactaaaactccacctcaaacggcatcataaagaaaatggatgcctgagacagaatgtgacatattctagaatatattatttcctgaatatatatatatatatacacatataccatatgaaacacctctaggctataaggcaacagagctccttttttttttttctgtgctttcctggctgtccaaatctctaatgataagcatacttctattcaatgagaatattctgtaagattatagttaagaattgtgggagccattccgtctcttatagttaaatttgagcttcttttatgatcactgtttttttaatatgctttaagttctggggtacatgtgccatggtggtttgctgcacccatcaacccgtcatctacattaggtatttctcctaatgctatccttcccctagccccccacccccaacaggccccagtgtgtgatgttcccctccctgtgtccatggatcactggtttttttttgttttttttttttttttaaagtctcagttaaatttttggaatgtaatttattttcctggtatcctaaggacttgcaagttatctggtcactttagccctcacgttttgatgataatcacatatttgtaaacacaacacacacacacacacacacacacatatatatatatataaaacatatatatacataaacacacataacatatttatcgggcatttctgagcaactaatcatgcaggactctcaaacactaacctatagccttttctatgtatctacttgtgtagaaaccaagcgtggggactgagaaggcaatagcaggagcattctgactctcactgcctttagctaggcccctccctcatcacagctcagcatagtcctgagctcttatctatatccacacacagtttctgacgctgcccagctatcaccatcccaagtctaaagaaaaaaataatgggtttgcccatctctgttgattagaaaacaaaacaaaataaaataagcccctaagctcccagaaaacatgactaaaccagcaagaagaagaaaatacaataggtatatgaggagactggtgacactaagtgtctgaatgaggcttgagtacagaaaagaggctctagcagcatagtggtttagaggagatgtttctttccttcacagatgccttagcctcaataagcttgcggttgtggaagtttacttgtttatcaccggtgacgtccatgagcaaattaagaaaaacaacaacaaatgaatgcatatatatgtatatgtatgtgtgtatatatacacatatatatatatattttttttcttttcttaccagaaggttttaatccaaataaggagaagatatgcttagaactgaggtagagttttcatccattctgtcctgtaagtattttgcatattctggagacgcaggaagagatccatctacatatcccaaagctgaattatggtagacaaaactcttccacttttagtgcatcaatttcttatttgtgtaataagaaaattgggaaaacgatcttcaatatgcttaccaagctgtgattccaaatattacgtaaatacacttgcaaaggaggatgtttttagtagcaatttgtactgatggtatggggccaagagatatatcttagagggagggctgagggtttgaagtccaactcctaagccagtgccagaagagccaaggacaggtacggctgtcatcacttagacctcaccctgtggagccacaccctagggttggccaatctactcccaggagcagggagggcaggagccagggctgggcataaaagtcagggcagagccatctattgcttacatttgcttctgacacaactgtgttcactagcaacctcaaacagacaccatgggtcatttcacagaggaggacaaggctactatcacaagcctgtggggcaaggtgaatgtggaagatgctggaggagaaaccctgggaaggtaggctctggtgaccaggacaagggagggaaggaaggaccctgtgcctggcaaaagtccaggtcgcttctcaggatttgtggcaccttctgactgtcaaactgttcttgtcaatctcacaggctcctggttgtctacccatggacccagaggttctttgacagctttggcaacctgtcctctgcctctgccatcatgggcaaccccaaagtcaaggcacatggcaagaaggtgctgacttccttgggagatgccataaagcacctggatgatctcaagggcacctttgcccagctgagtgaactgcactgtgacaagctgcatgtggatcctgagaacttcaaggtgagtccaggagatgtttcagccctgttgcctttagtctcgaggcaacttagacaactgagtattgatctgagcacagcagggtgtgagctgtttgaagatactggggttgggggtgaagaaactgcagaggactaactgggctgagacccagtggtaatgttttagggcctaaggagcgcctctaaaaatctagatggacaattttgactttgagaaaagagaggtggaaatgaggaaaatgacttttattagattccagtagaaagaactttcatctttccctcatttttgttcgttttaaaacatctatctggaggcaggacaagtatggtcgttaaaaagatgcaggcagaaggcatatattggctcagtcaaagtggggaactttggtggccaaacatacattgctaaggctattcctatatcagctggacacatataaaatgctgctaatgcttcattacaaacttatatcctttaattccagatgggggcaaagtatgtccaggggtgaggaacaattgaaacatttgggctggagtagattttgaaagtcagctctgtgtgtgtgtgtgtgtgcgcgcgcgcgtgtgtgtgtgtgtgtgtcaacgtgtgtttcttttaacgtcttcagcctacaacatacagggttcatggtggcaagaagatagcaagatttaaattatggccagtgactagtgcttgaaggggaacaactacctgcatttaatgggaaggcaaaatctcaggctttgagggaagttaacataggcttgattctgggtagaagctgggtgtgtagttatctggaggccaggctggagctctcagctcactatgggttcatctttattgtctcctttcatctcaacagctcctgggaaatgtgctggtgaccgttttggcaatccatttcggcaaagaattcacccctgaggtgcaggcttcctggcagaagatggtgactgcagtggccagtgccctgtcctccagataccactgagcctcttgcccatgattcagagctttcaaggataggctttattctgcaagcaattcaaataataaatctattctgctgagagatcacacatgattttcttcagctcttttttttacatctttttaaatatatgagccacaaagggtttatattgagggaagtgtgtatgtgtatttctgcatgcctgtttgtgtttgtggtgtgtgcatgctcctcatttatttttatatgagatgtgcattttgttgagcaaataaaagcagtaaagacacttgtacacgggagttctgcaagtgggagtaaatggtgtaggagaaatccggtgggaagaaagacctctataggacaggacttctcagaaacagatgttttggaagagatgggaaaaggttcagtgaagacctgggggctggattgattgcagctgagtagcaaggatggttcttaatgaagggaaagtgttccaagctttaggaattcaaggtttagtcaggtgtagcaattctattttattaggaggaatactatttctaatggcacttagcttttcacagcccttgtggatgcctaagaaagtgaaattaatcccatgccctcaagtgtgcagattggtcacagcatttcaagggagagacctcattgtaagactctgggggaggtggggacttaggtgtaagaaatgaatcagcagaggctcacaagtcagcatgagcatgttatgtctgagaaacagaccagcactgtgagatcaaaatgtagtgggaagaatttgtacaacattaattggaaggcttacttaatggaatttttgtatagttggatgttagtgcatctctataagtaagagtttaatatgatggtgttacggacctaatgtttgtgtctcctcaaaattcacatgctgaatccccaactcccaactgaccttatctgtgggggaggcttttgaaaagtaattaggtttagatgagctcataagagcagatccccatcataaaattattttccttatcagaagcagagagacaagccatttctctttcctcccggtgaggacacagtgagaagtccgccatctgcaatccaggaagagaaccctgaccacgagtcagccttcagaaatgtgagaaaaaactctgttgttgaagccacccagtcttttgtattttgttatagcaccttgcactgagtaaggcagatgaagaaggagaaaaaaataagcttatcgaaacgcgtccccatcctcactgactccgtcctggagttggatgagagataatggccttacgttgtgccaggggagggtcgggctggatttagcaagatttaccttctccaaagagcggtgctgcagtggcacagctgcccacggaggtgggggggtcaccgtccctggaggtgatgaagaactgtggggatgtggcactgagggacatggccagtgggcacggtgggtgggttggggttggtcttggggatcttggagggcttttccagccttcatgatttgacgattgtatgaacatctacatggcaattctccagctgcctgtcccagtcctactgacccagctgtatctctccaggcaagctcttccaccccttctgcttgcatccagacaccatcaaacatgcaggctcagacacagggaccagcagtgtctgtggcctttttgtgctcctctccatgctgggttttaacttgctctttgtccttctatcctatcttcttatccttaaggctgttctgaacgctgtgacttggagagtgtcccagagccctcaacacctgcatgtcccacgtccatgctgtcctgcacttccttatccccaagatctgcctctccgtgatgcactgaattggcaaacatgtgtcaccccagaccaacaatgtcacagcaaactcccccttgataggacaagggggaatggctttacactgagacaggggaggtttgggttggatatgaggaggcagtttttcccccagagggtggtgacgcactgaacaggttgcccaaggaggctgtggatgccccatccctgcaggcattcaaggccaggctggatgtggctctgggcagcctgggctgctggttgatgaccctgcacatagcagggggttggatctggatgagcactgtgctcctttgcaacccaggccgttctatgattctgtcattctaaatctctctttcagcctaaagctttttccccgtatccccccaggtgtctgcaggctcaaagagcagcgagaagcgttcagaggaaagcgatcccgtgccaccttccccgtgcccgggctgtccccgcacgctgccggctcggggatgcggggggagcgccggaccggagcggagccccgggcggctcgctgctgccccctagcgggggagggacgtaattacatccctgggggctttgggggggggctgtccctatcgattactagtttagccatagagcccaccgcatccccagcatgcctgctattgtcttcccaatcctcccccttgctgtcctgccccaccccaccccccagaatagaatgacacctactcagacaatgcgatgcaatttcctcattttattaggaaaggacagtgggagtggcaccttccagggtcaaggaaggcacgggggaggggcaaacaacagatggctggcaactagaaggcacagtcgctcgaagagcggccgctcgctttacttgtacagctcgtccatgccgagagtgatcccggcggcggtcacgaactccagcaggaccatgtgatcgcgcttctcgttggggtctttgctcagggcggactgggtgctcaggtagtggttgtcgggcagcagcacggggccgtcgccgatgggggtgttctgctggtagtggtcggcgagctgcacgctgccgtcctcgatgttgtggcggatcttgaagttcaccttgatgccgttcttctgcttgtcggccatgatatagacgttgtggctgttgtagttgtactccagcttgtgccccaggatgttgccgtcctccttgaagtcgatgcccttcagctcgatgcggttcaccagggtgtcgccctcgaacttcacctcggcgcgggtcttgtagttgccgtcgtccttgaagaagatggtgcgctcctggacgtagccttcgggcatggcggacttgaagaagtcgtgctgcttcatgtggtcggggtagcggctgaagcactgcacgccgtaggtcagggtggtcacgagggtgggccagggcacgggcagcttgccggtggtgcagatgaacttcagggtcagcttgccgtaggtggcatcgccctcgccctcgccggacacgctgaacttgtggccgtttacgtcgccgtccagctcgaccaggatgggcaccaccccggtgaacagctcctcgcccttgctcaccatgggccctgggttggactccacgtctcccgccaacttgagaaggtcaaaattcaaagtctgtttcacctcgaggtttcggccagcaggcggggagcccgaggtagctcccgctcccttgagccaggcccctgccagacctgagctccctcccaagcctggcttccccaaccggtggccttcatgggccagaagccattccttcacggctagccctccggagtagttgcccacggctccgctgctgcagaccactctgtggcacgggatgaggatcttgacaggattgcctctcatggcgcctcccactgctcgcgcggctttggggttgccggccagggcggccaattgctggtaagaaatcacttctccgaatttcacaaccttaagcagcttccataacacctgacgcgtgaacgactcttgctggaaaacgggatggtgaagcgctggcacggggaactcttcgatagcctcgggctggtggaaataggcattcagccaggctgtgcactgcatcaggggctccggacctccgagaaccgcagcgggggctgggacctccacggcatcagctgcagacgtccccttgcccaggagctttatttcgtgcagaccctgctcacaaccagacagctccagcttccccaaagggctgtccagtgtggtgcgtttcatttcacaatccttgtccatggtggccctaggccctggggagagaggtcggtgattcggtcaacgagggagccgactgccgacgtgcgctccggaggcttgcagaatgcggaacaccgcgcgggcaggaacagggcccacactaccgccccacaccccgcctcccgcaccgccccttcccggccgctgctctcggcgcgccccgctgagcagccgctattggccacagcccatcgcggtcggcgcgctgccattgctccctggcgctgtccgtctgcgagggtactagtgagacgtgcggcttccgtttgtcacgtccggcacgccgcgaaccgcaaggaaccttcccgacttaggggcggagcaggaagcgtcgccggggggcccacaagggtagcggcgaagatccgggtgacgctgcgaacggacgtgaagaatgtgcgagacccagggtcggcgccgctgcgtttcccggaaccacgcccagagcagccgcgtccctgcgcaaacccagggctgccttggaaaaggcgcaaccccaaccccgtggaaataaatcgataactagtgatatcatcatgtctggatcccatcacaaagctctgacctcaatcctatagaaaggaggaatgagccaaaattcacccaacttattgtgggaagcttgtggaaggctactcgaaatgtttgacccaagttaaacaatttaaaggcaatgctaccaaatactaattgagtgtatgttaacttctgacccactgggaatgtgatgaaagaaataaaagctgaaatgaatcattctctctactattattctgatatttcacattcttaaaataaagtggtgatcctaactgaccttaagacagggaatctttactcggattaaatgtcaggaattgtgaaaaaagtgagtttaaatgtatttggctaaggtgtatgtaaacttccgacttcaactgtaggggatcctctagggccgccagtgtgatggatatctgcagaattcggcttcaggtaccgtcgacgatgtaggtcacggtctcgaagccgcggtgcgggtgccagggcgtgcccttgggctccccgggcgcgtactccacctcacccatctggtccatcatgatgaacgggtcgaggtggcggtagttgatcccggcgaacgcgcggcgcaccgggaagccctcgccctcgaaaccgctgggcgcggtggtcacggtgagcacgggacgtgcgacggcgtcggcgggtgcggatacgcggggcagcgtcagcgggttctcgacggtcacggcgggcatgtcgacaagccgaattccagcacactggcggccgttactaggtagctagctcgagccttcgaagatctcctagggaagttcctatactttctagagaataggaacttcggaataggaacttcaccggtgggtgaaaagccgaattctgcagatatcaagcttatcgataccgtcgacctcgagggggggcccggttagatccccgggtaccgagctcgaatatctatgtcgggtgcggagaaagaggtaatgaaatggattaagtggcaggattaattaagtggcaggattaatcttcgaacgaaggagccatccaactaaccgtcatgttcgggcaaccgaagaagggagtggcaggatttcctttggagacttctggaattagacagcagtttaatgcaagcatctaaattctcttcctcccagagtctcattaaaactacagtaagagtttgtgttttgttttgtttttaaagacaaaatcccaccaggatagagagaataggagaggagataacagcatcataatttatgaaactaaaatgcagatagaccaggattaactgactacacagcaccaaggaagctgaatcacaagacagcagaggagaaaactggaaaggatcgtggtctatacggcagaatcttcccaagcctcaggaggaggagctctagatgcttatgatggcaactaaagcctaaaagctaattcattttaaagttcttccaaatgcatagggttttatttttccagacctgggttcagatggggaatttgacaaacaatggaaagggggaaaaacaacaatctaaacactgagtgacaaagtaacaaagaaatagtctagctatcagccagtcaagccagccttggctttgctatccaaagtagtcagtctaattctaccaccagtttctgttcctgtagctgtctactgcctgccagggactctgccttcccacccacaactaccaatggaaggatgtggtgaccataccagtggctgctgacatctcctgccatgggaagcataattgcctccagcagcctcccccttagatccatcatttttgttgcacttggcctgggctgtactcccggccaatgactgaacatggtgagcatagtaatgcaggcccatttctgtgaggagcaggactcctccagtaggtgactttggctcaaggactctctattggcctggttgaacttttcctgaactgtgctactgtctgagactcttcttacccaatcctctttctcgccccaattgtcacagaccacctgcattgtggtctgagtctctccccaccttctcttgctcttccctgtttatctttcacaggcatttcccccagtacattccttgaatgtctaacccgatacgggtgcctgacttttggcagacctaagcagacaaaaaggagtacttggttacctagctcttctttctaccacaaacatcgagggaaccctttttccctcacccctctgccacacccccactgccccagtgaacaaccacagagagagctgtggtataatattaggctggtgcaaaagtaattgcggtttttgccattacttttaatggtaaaaaccgcaattacttttgcacctacctagtatttgtgtccccccaaattcatatgttgaaacctaacccacaatatgatgtcattaggaggcaagaccttgaggaggtgattagatgatggggtggagctctcctgaatgagattagtgcccttataagaagaagcccaaggaagctaccttgactcttccatcacatgagaatgcagcaagaaggcaccatctactaatcaggaagagagctctcaccagacactgaatctgccagtgtcttgatcttgaagttcccagcctccagaactatgcataatgcatttccattgtctctaagccacccagcctatggtattttgtcatagcagcctgaactgactaagacagtgagccacatgagaagtgccccaacccctcccttaagcacttggctcacagatcagtgggttcatttctgcctgagttttattgttattctgtagatttcttgggctagatatatttttctgttattttccttcttcacctcagtcatgaattggttgttttaaaaaagacaatgtaagtcatggggaaactcctgacaactctactctcctagggttcctgataaaaggggattcagttgagtcctctgatggtctctacctgccaaagtccagcagcccttagcaaacatgctgctcgtttctgtagagaaggtgctggtgtcccaccatacttctctctccctcatgaagggcttgcgacccagcaaatgggtggcttatatgggtctgtttcaaaggaagagccagctctgggaagaaaaacgatgagcataagcataacctaccactgtgcctgggaaagcagacaacttttttgatgtgtgaatatctaatgagaatggaatccatcaattaccttaaacttaggcacagtcttcaaattcaatatatgtgggatatacttttagtcagtttgtagacgttatttgtaataaataatctggcttctctaaagaaattattttaagtgtttggtttggtttgatttaatggtaaaattatatttagtggcagagaattatagcaatggtgataaactatagagtgtcataagttcatatcttattctcacatttgaagctgcctgcagatgcattcaagatgcagccagaagtcaggagactcaggctgttatttggagctcatcattttacagccttgctggactcccactttctcaggggaaaaatgtggtgttgacccagattagctctccaggccctgctgagttgggcactctgtaagctggagggtcttctattgtcttcacctaagtgtcaatcaacaacccaaatgggcatgggggaagagggagctgggccaatgcccagggtgcctggtagagagataccttgggcactggaaggcaccagcttcccagagagaagggggagggccatgaaaaagttggctgtagatgccagggacactgggactctccagctgtgtgtttgtgtcttctgaagacttatgtttcattcctttggagcatgcataatcatacactgtgggatgtgttatatagattgcttgatagttcaccactgtaataaaatactgtgactggaatctgctcccagtctgcctttgatagcacttgtgcaacacacatttactgagcatttacagtgatccaggacctgtgttgtgaaaacattgatggacaaggcagatggtggagcacgtcagtgaggatttttaacaaaggctggtaagtgctataaaggaacattgtaggacactagagaacaaagaacaggagaacctgacttaggctggggtggggcgttggttagaggaggctccttggaggacatgaggtttaagctgtgacctgaggatgaatagatgttggccaggtgaggttaatctggggctcaagatcgagcattaagcttgtcagccttaccagtaaaaaagaaaacctattaaaaaaacaccactcgacacggcaccagctcaatcagtcacagtgtaaaaaagggccaagtgcagagcgagtatatataggactaaaaaatgacgtaacggttaaagtccacaaaaaacacccagaaaaccgcacgcgaacctacgcccagaaacgaaagccaaaaaacccacaacttcctcaaatcgtcacttccgttttcccacgttacgtaacttcccattttaagaaaactacaattcccaacacatacaagttactccgccctaaaacctacgtcacccgccccgttcccacgccccgcgccacgtcacaaactccaccccctcattatcatattggcttcaatccaaaataaggtatattattgatgatgtttaaactacggcccggtacccagcttttgttccctttagtgagggttaattgcgcgcttggcgtaatcatggtcatagctgtttcctgtgtgaaattgttatccgctcacaattccacacaacatacgagccggaagcataaagtgtaaagcctggggtgcctaatgagtgagctaactcacattaattgcgttgcgctcactgcccgctttccagtcgggaaacctgtcgtgccagctgcattaatgaatcggccaacgcgcggggagaggcggtttgcgtattgggcgctcttccgcttcctcgctcactgactcgctgcgctcggtcgttcggctgcggcgagcggtatcagctcactcaaaggcggtaatacggttatccacagaatcaggggataacgcaggaaagaacatgtgagcaaaaggccagcaaaaggccaggaaccgtaaaaaggccgcgttgctggcgtttttccataggctccgcccccctgacgagcatcacaaaaatcgacgctcaagtcagaggtggcgaaacccgacaggactataaagataccaggcgtttccccctggaagctccctcgtgcgctctcctgttccgaccctgccgcttaccggatacctgtccgcctttctcccttcgggaagcgtggcgctttctcatagctcacgctgtaggtatctcagttcggtgtaggtcgttcgctccaagctgggctgtgtgcacgaaccccccgttcagcccgaccgctgcgccttatccggtaactatcgtcttgagtccaacccggtaagacacgacttatcgccactggcagcagccactggtaacaggattagcagagcgaggtatgtaggcggtgctacagagttcttgaagtggtggcctaactacggctacactagaaggacagtatttggtatctgcgctctgctgaagccagttaccttcggaaaaagagttggtagctcttgatccggcaaacaaaccaccgctggtagcggtggtttttttgtttgcaagcagcagattacgcgcagaaaaaaaggatctcaagaagatcctttgatcttttctacggggtctgacgctcagtggaacgaaaactcacgttaagggattttggtcatgagattatcaaaaaggatcttcacctagatccttttaaattaaaaatgaagttttaaatcaatctaaagtatatatgagtaaacttggtctgacagttaccaatgcttaatcagtgaggcacctatctcagcgatctgtctatttcgttcatccatagttgcctgactccccgtcgtgtagataactacgatacgggagggcttaccatctggccccagtgctgcaatgataccgcgagacccacgctcaccggctccagatttatcagcaataaaccagccagccggaagggccgagcgcagaagtggtcctgcaactttatccgcctccatccagtctattaattgttgccgggaagctagagtaagtagttcgccagttaatagtttgcgcaacgttgttgccattgctacaggcatcgtggtgtcacgctcgtcgtttggtatggcttcattcagctccggttcccaacgatcaaggcgagttacatgatcccccatgttgtgcaaaaaagcggttagctccttcggtcctccgatcgttgtcagaagtaagttggccgcagtgttatcactcatggttatggcagcactgcataattctcttactgtcatgccatccgtaagatgcttttctgtgactggtgagtactcaaccaagtcattctgagaatagtgtatgcggcgaccgagttgctcttgcccggcgtcaatacgggataataccgcgccacatagcagaactttaaaagtgctcatcattggaaaacgttcttcggggcgaaaactctcaaggatcttaccgctgttgagatccagttcgatgtaacccactcgtgcacccaactgatcttcagcatcttttactttcaccagcgtttctgggtgagcaaaaacaggaaggcaaaatgccgcaaaaaagggaataagggcgacacggaaatgttgaatactcatactcttcctttttcaatattattgaagcatttatcagggttattgtctcatgagcggatacatatttgaatgtatttagaaaaataaacaaataggggttccgcgcacatttccccgaaaagtgccacctgacgcgccctgtagcggcgcattaagcgcggcgggtgtggtggttacgcgcagcgtgaccgctacacttgccagcgccctagcgcccgctcctttcgctttcttcccttcctttctcgccacgttcgccggctttccccgtcaagctctaaatcgggggctccctttagggttccgatttagtgctttacggcacctcgaccccaaaaaacttgattagggtgatggttcacgtagtgggccatcgccctgatagacggtttttcgccctttgacgttggagtccacgttctttaatagtggactcttgttccaaactggaacaacactcaaccctatctcggtctattcttttgatttataagggattttgccgatttcggcctattggttaaaaaatgagctgatttaacaaaaatttaacgcgaattttaacaaaatattaacgcttacaatttccattcgccattcaggctgcgcaactgttgggaagggcgatcggtgcgggcctcttcgctattacgccagctggcgaaagggggatgtgctgcaaggcgattaagttgggtaacgccagggttttcccagtcacgacgttgtaaaacgacggccagtgagcgcgcgtaatacgactcactatagggcgaattggagctccactacgtagtttaaacatcatcaataatataccttattttggattgaagccaatatgataatgagggggtggagtttgtgacgtggcgcggggcgtgggaacggggcgggtgacgtagtagtgtggcggaagtgtgatgttgcaagtgtggcggaacacatgtaagcgacggatgtggcaaaagtgacgtttttggtgtgcgccggtgtacacaggaagtgacaattttcgcgcggttttaggcggatgttgtagtaaatttgggcgtaaccgagtaagatttggccattttcgcgggaaaactgaataagaggaagtgaaatctgaataattttgtgttactcatagcgcgtaatatttgtctagggccgcggggactttgaccgtttacgtggagactcgcccaggtgtttttctcaggtgttttccgcgttccgggtcaaagttggcgttttgattc

SEQ ID NO: 179 - DNA, 33514 bp, Artificial Sequence
  pHCA-Dual2-FI-globin-mgmtGFP
  misc_feature (1)..(440): Ad5 5' end
  misc_feature (6169)..(6395): Sleeping beauty IR
  misc_feature (6661)..(10971): HS4 to HS1
  misc_feature (10991)..(11653): Beta promoter
  misc_feature (11690)..(16093): ET3
  misc_feature (18661)..(19284): Mgmt (reverse)
  misc_feature (19302)..(20636): Ef1a promoter (reverse)
  misc_feature (20868)..(21095): Sleeping beauty IR
  misc_feature (33317)..(33514): Ad5 3' end
catcatcaataatataccttattttggattgaagccaatatgataatgagggggtggagtttgtgacgtggcgcggggcgtgggaacggggcgggtgacgtagtagtgtggcggaagtgtgatgttgcaagtgtggcggaacacatgtaagcgacggatgtggcaaaagtgacgtttttggtgtgcgccggtgtacacaggaagtgacaattttcgcgcggttttaggcggatgttgtagtaaatttgggcgtaaccgagtaagatttggccattttcgcgggaaaactgaataagaggaagtgaaatctgaataattttgtgttactcatagcgcgtaatatttgtctagggccgcggggactttgaccgtttacgtggagactcgcccaggtgtttttctcaggtgttttccgcgttccgggtcaaagttggcgttttgattcggccgaaggattacatgagcttagaaatgtaattagcatagtgtgtggcatagtgtagataccaaataaatatgatctctccttctactcttgaaaatgcaaacacattcttggtggtcctaaaatagcctgtaacatggtttactcagcagcatttgctattcaaggcagatctgcctttagtcattggctgcgctcctgaacagctgtgtgaaaggctaacttttgtaaaccaaatcaaaataaaatgcagcaaaaatttgtcactgaaaggaaatcctcagtatatccttttatgaaatgaaagatccctcatccaaacttaacttttttaaaagtgcgcatttggagatatagccctttcttatgaatcctaattcaattttggccataaacacacgttgatgttccccaccccaaagcacatagcaacaagagtaggttctatattgaaaataatgacaatttaaaaacatgtacttatttcactgtatgtggacagtgtctatgattgcatcatgaagtgtcatataaccatgtacgtgtacatgagagagagatagagagagaagtggtagggtggtggtggtagaggggatggcgatagtaatcatggtaatggtagaggtgatggaggtggtaatgacggaggtaagggtggtagtgatgatggtggtggtggtaatggtggtggatgtggtggtggcaattgggatggtgggatggtggtagccatggtgatggtggtaatggtgttgatttaaagggtggtggtagtgaaggtgagggtagtggtggtggaggtggtggtgctggtagcaatagtgatggtggtgatggtgttgatgagggtgttgggatcagggtgagttcccacagtatatttcattcttgttgtaccactctgtcaacagcaccactgactgggacagaggaagaaggcacactctgaatgtgttattaacagaaacctcaaaacagtctgtctccttgtagtcattcaaaattatctttttcttacctggaaaactgaaactgaattaccgggaaaaacacaggagatttttgtttgttaatatgctgccaataaagtaattttatgtcaaatttaactacaggaaagggcaaggcattttctaagttccttagatgtcatgtggctaaaaaaaacaaaaggatggacagcagttagatactgtacacttagctgtttgaagccatatattcagaaagcagatgttgggagttggtgtttgaggactgatttcctggaggtattttatataggccaagttcattgttctaaactctaagggcttgacttgagggaggaaaagaggcaagaacatgtttagttttgctgacagcatcacatgggcagccctaaggctagacaactttagggcctgaagcttattctaggaaagaagcacctacagagtggcactgggctcccctccactatagagatgaagtcatatgacagtaaagggcaggcagggctgcctagggggcccattgaaattgcggccgcaaataatgggcccggagcaagagagagggaggcaatgacagcagagacatgcctgcgccttgggtttgagtgcccagtggtcaaatccacttccctgtggctgatgcttgcctttctaactttggaatttaggggttggagatctggtgagaaggtaggagggagatgaggaggagaagggaaaggcaggaaggaaggggagggaaaggaaaagcaaaaggggaggaggaaggtttccaacaaattattctatatcaactgcggaaatcaaaatttgttgcccaaatcttagaagctcatgtccctcctccccagaagtctggaatgcagcactccaggggtagcttataacccaaatatctatctgtaaaaagagaaacattgggctttcgagctgtggattctcagtaaaagcaagaggcctcagcctacacaggccagcccagagtttgaggaaccccaggcccacacccacagggctggcccctgggtctgcatactccctagaaatgtgcacacttctgagcctcaactctgtcctggagtctaacagcatccctctccttcctggggcagttccacctccagaaacctgttaccttgggccttatgtcaaggaaactgtgggaaagagctaggcaggaatgcagatgaggccagcatgggctcctaaaagtttagaaataggcagtgtcatgctcccaggtgcctgcataaaccagctgaaaaatggagctcccctcaccagcactctcccttcaaacagactgtgatttgcaggtcactggtttaccaagccaggctacccaggcaggacccagatgccaagcccagtggtgtcctgcaagctgagcagtgctcagttcttgcaaaaaaaggtctgtgtgaaggcaaggcctctgcctggcttctcaccccagttgggtgtctggaacaggaaggagcccttactgcagaaaaaggaggagggagcaaagggagcgaacagctgcgtgctccatggggaggatccccaaagtagaaaggcgcatacacactgcagcccttgacccagaatgctcacagctacattacagattcaggtctcctcagtgtagtggggctgctgatgagactgtggcatcctcaggggtcaggacacacattttccatcactcttctgatggcaaaaaacctctgagccaatgccaacctctgatcattaaaaaaaagtgctcacagcagtgtgtggtttaggatcatgccctgtgtggtttggaacacgtgcacaaccacaccttgttcatcaccatcccagaaaccctgacgcaggcaaagagcagagttattaaccctactttactgatgtggatactgaggcccagaggctcatgcaagttatcaataagtggcagggacagttgcctctagattaactagcccctaggatcacctgggtcttggaaggggacccataaacatgagctcccctctcttggggccagatttgcacctgtgccgcgccttcagcctgcatgaagtaggggctgctggcaaagactcaaagctgtaaatctgggttttctcttgaggcttctaagggagctgtttcgacaactcactctgttcccagctggctgcccctgcatagggttttaaagcagcctagctttctgccaggcttggcagtggacaacgctggtcagaacatcccagagagctaccagaatgaagtaagtttgcttctactctttacctgtttatgggctgtctctgccactggaatgaaaggcactgagaacagtgcctggcctgcagaaggccctggaaatacctgagctcctaatctgggaataggagtaggaagagctttggaggcagggcacctgagtttgagatctacaacttcctgcctgtgtgacattgggaaagtctccatcctttctgagcctcagtctccaccctggggaagtggaaatatcaatctctgtgacacagaagcaaatgagcgaatgtgcacaaagtaccttgcacaagagagacgctcaaacacttgcctccaggtttcaccgagaactacagagtaagatagatttgttcccagtggaggaagcctgggaataatttgcccctagactatgaattcctggggctcaagatcgagcacagggccaggcacacagaagggaccctggaaatgtggcaggaggccagagatagacaggcccttagagctcatacccatgccctctgacctcaagaagaaagaaacctgctcaaaatctcacaaagagcttgttccaaccctgaatcgagtctgaggactccttcctgagtccagcactttttctgcaagaagtatatgcctccaaagctgatgggcgcaaatcttgaaccccgtcacataaacacaaagggaggaggtgactagagctcctcctactggatatgtctaaggtcaccagtctaaagaaaagggatggatagaatgaggccagtatttttgcagccatccaaatgtccacatacgctgttacactgagggctcctctctcccccgtcttcagccctacttgcatttagaggtgagaaagatatgggctgaggggttgtttttcatcgtattgtagatggaaagcacactgcccttggggccatccaaatgtggaccttgatgtagcaccccaccttctggatggccatccttctgaaagtcactgaatttctcagactttattctctttatccataaagaaggagaataataataatccccccaccctgcccaaccactgactggttgggaagctcagaagaaatactgggcacggcatcccattgtaatctatagagtgagtcgcttcttaatattaaatggctgaacacagaagatgtgcaaaaagtactgtgtccccttcctcctccaactgaacatttcatgccctttgcaccctcattttgtctaggagctgccttatgaagggaataggtacctgctccgagctggaggaatctttgccacttatggtggggtatggactgagacagagatggcatgtgacatgcgcactgagtctcaactccatgcaggctctggagcactctcaaattggagtactaatgccttttaaattctcacactagcaatcctttgacctactgatctagggatctagggaaagaatcgtgatcttaacttcaaagggaaggacaaaatgttctgcctcctgttaaaactccatacactaagtgcagagactggatgccttattaaccttgggtagatgcccaaatgttcaaaaggtcaaactcttctgttccccagatcgccagagtcattaaccagtcacactattaaatgaatgaacagatgctgaaaaggtacttgcattactgagatttcttatggtgatggcccctgcctgatatgtattcagcattttgtagttttcaatgtgcattagagtatagtggtgatgacattggcctctgagtttgccacttcttatatctgtgactttggtcaaattgcttaatctctctgagtctcggtttcctggagataataatagcttcttcttcccagggttatcatgaggattacaggagataatgccccaaaaatgcttagtaaagtgcctagcacctagtcaatgctgaattaaaggtggttattcttacttttcgttcatttgaactttgttctcagggagggcaaaggatagacaaagccccatagctagtgaggagtagctgcaagactagaacccaggtgttctgagccctagtcttaggccaagaacaactgttacgtgagatgcacgttttccttcaagggagctcacaattatttccatgtaaattcaaggactgctaaaagagaactctcctctgggactgataaacatctagtcgagtatcgacaaataggggttccgcgcacatttccccgaaaagtgccacctgacgtaactataacggtcctaaggtagcgaaagcttgcatgcctgcaggtcgactctagaggatcaaacctagccaccgcggtggcggccggctagccggctagccggctagccctagaactagtaacggccgccagtgtgctggaattcggcttgtaaggtaccggtgaagttcctatactttctagagaataggaacttcggaataggaacttctacctagatgcatgctcgagcggcccctacagttgaagtcggaagtttacatacacttaagttggagtcattaaaactcgtttttcaactactccacaaatttcttgttaacaaacaatagttttggcaagtcagttaggacatctactttgtgcatgacacaagtcatttttccaacaattgtttacagacagattatttcacttataattcactgtatcacaattccagtgggtcagaagtttacatacactaagttgactgtgcctttaaacagcttggaaaattccagaaaatgatgtcatggctttagaagcttctgatagactaattgacatcatttgagtcaattggaggtgtacctgtggatgtatttcaaggaattctgtggaatgtgtgtcagttagggtgtggaaagtccccaggctccccagcaggcagaagtatgcaaagcatgcatatcgatactagtttataagatctcgagctagcggccgtttgttaattaagtcgacggtaccgtcaaggctgcagtgagacatgatcttgccactgcactccagcctggacagcagagtgaaaccttgcctcacgaaacagaatacaaaaacaaacaaacaaaaaactgctccgcaatgcgcttccttgatgctctaccacataggtctgggtactttgtacacattatctcattgctgttcataattgttagattaattttgtaatattgatattattcctagaaagctgaggcctcaagatgataacttttattttctggacttgtaatagctttctcttgtattcaccatgttgtaactttcttagagtagtaacaatataaagttattgtgagtttttgcaaacacagcaaacacaacgacccatatagacattgatgtgaaattgtctattgtcaatttatgggaaaacaagtatgtactttttctactaagccattgaaacaggaataacagaacaagattgaaagaatacattttccgaaattacttgagtattatacaaagacaagcacgtggacctgggaggagggttattgtccatgactggtgtgtggagacaaatgcaggtttataatagatgggatggcatctagcgcaatgactttgccatcacttttagagagctcttggggaccccagtacacaagaggggacgcagggtatatgtagacatctcattctttttcttagtgtgagaataagaatagccatgacctgagtttatagacaatgagcccttttctctctcccactcagcagctatgagatggcttgccctgcctctctactaggctgactcactccaaggcccagcaatgggcagggctctgtcagggctttgatagcactatctgcagagccagggccgagaaggggtggactccagagactctccctcccattcccgagcagggtttgcttatttatgcatttaaatgatatatttattttaaaagaaataacaggagactgcccagccctggctgtgacatggaaactatgtagaatattttgggttccatttttttttccttctttcagttagaggaaaaggggctcaggatccacttgcccagtgttcttccttagttcctaccttcgaccttgatcctcctttatcttcctgaaccctgctgagatgatctatgtggggagaatggcttctttgagaaacatcttcttcgttagtggcctgcccctcattcccactttaatatccagaatcactataagaagaatataataagaggaataactcttattataggtaagggaaaattaagaggcatacgtgatgggatgagtaagagaggagagggaaggattaatggacgataaaatctactactatttgttgagaccttttatagtctaatcaattttgctattgttttccatcctcacgctaactccataaaaaaacactattattatctttattttgccatgacaagactgagctcagaagagtcaagcatttgcctaaggtcggacatgtcagaggcagtgccagacctatgtgagactctgcagctactgctcatgggccctgtgctgcactgatgaggaggatcagatggatggggcaatgaagcaaaggaatcattctgtggataaaggagacagccatgaagaagtctatgactgtaaatttgggagcaggagtctctaaggacttggatttcaaggaattttgactcagcaaacacaagaccctcacggtgactttgcgagctggtgtgccagatgtgtctatcagaggttccagggagggtggggtggggtcagggctggccaccagctatcagggcccagatgggttataggctggcaggctcagataggtggttaggtcaggttggtggtgctgggtggagtccatgactcccaggagccaggagagatagaccatgagtagagggcagacatgggaaaggtgggggaggcacagcatagcagcatttttcattctactactacatgggactgctcccctatacccccagctaggggcaagtgccttgactcctatgttttcaggatcatcatctataaagtaagagtaataattgtgtctatctcatagggttattatgaggatcaaaggagatgcacactctctggaccagtggcctaacagttcaggacagagctatgggcttcctatgtatgggtcagtggtctcaatgtagcaggcaagttccagaagatagcatcaaccactgttagagatatactgccagtctcagagcctgatgttaatttagcaatgggctgggaccctcctccagtagaaccttctaaccagctgctgcagtcaaagtcgaatgcagctggttagactttttttaatgaaagcttgcatgcagcactttgggaggctgaggtgggtggactgcttggagctcaggagttcaagaccatcttggacaacatggtgataccctgcctctacaaaaagtacaaaaattagcctggcatggtggtgtgcacctgtaatcccagctattagggtggctgaggcaggagaattgcttgaacccgggaggcggaggttgcagtgagctgagatcgtgccactgcactccagcctgggggacagagcacattataattaactgttattttttacttggactcttgtggggaataagatacatgttttattcttatttatgattcaagcactgaaaatagtgtttagcatccagcaggtgcttcaaaaccatttgctgaatgattactatactttttacaagctcagctccctctatcccttccagcatcctcatctctgattaaataagcttcagtttttccttagttcctgttacatttctgtgtgtctccattagtgacctcccatagtccaagcatgagcagttctggccaggcccctgtcggggtcagtgccccacccccgccttctggttctgtgtaaccttctaagcaaaccttctggctcaagcacagcaatgctgagtcatgatgagtcatgctgaggcttagggtgtgtgcccagatgttctcagcctagagtgatgactcctatctgggtccccagcaggatgcttacagggcagatggcaaaaaaaaggagaagctgaccacctgactaaaactccacctcaaacggcatcataaagaaaatggatgcctgagacagaatgtgacatattctagaatatattatttcctgaatatatatatatatatacacatataccatatgaaacacctctaggctataaggcaacagagctccttttttttttttctgtgctttcctggctgtccaaatctctaatgataagcatacttctattcaatgagaatattctgtaagattatagttaagaattgtgggagccattccgtctcttatagttaaatttgagcttcttttatgatcactgtttttttaatatgctttaagttctggggtacatgtgccatggtggtttgctgcacccatcaacccgtcatctacattaggtatttctcctaatgctatccttcccctagccccccacccccaacaggccccagtgtgtgatgttcccctccctgtgtccatggatcactggtttttttttgttttttttttttttttaaagtctcagttaaatttttggaatgtaatttattttcctggtatcctaaggacttgcaagttatctggtcactttagccctcacgttttgatgataatcacatatttgtaaacacaacacacacacacacacacacacacatatatatatatataaaacatatatatacataaacacacataacatatttatcgggcatttctgagcaactaatcatgcaggactctcaaacactaacctatagccttttctatgtatctacttgtgtagaaaccaagcgtggggactgagaaggcaatagcaggagcattctgactctcactgcctttagctaggcccctccctcatcacagctcagcatagtcctgagctcttatctatatccacacacagtttctgacgctgcccagctatcaccatcccaagtctaaagaaaaaaataatgggtttgcccatctctgttgattagaaaacaaaacaaaataaaataagcccctaagctcccagaaaacatgactaaaccagcaagaagaagaaaatacaataggtatatgaggagactggtgacactaagtgtctgaatgaggcttgagtacagaaaagaggctctagcagcatagtggtttagaggagatgtttctttccttcacagatgccttagcctcaataagcttgcggttgtggaagtttacttgtttatcaccggtgacgtccatgagcaaattaagaaaaacaacaacaaatgaatgcatatatatgtatatgtatgtgtgtatatatacacatatatatatatattttttttcttttcttaccagaaggttttaatccaaataaggagaagatatgcttagaactgaggtagagttttcatccattctgtcctgtaagtattttgcatattctggagacgcaggaagagatccatctacatatcccaaagctgaattatggtagacaaaactcttccacttttagtgcatcaatttcttatttgtgtaataagaaaattgggaaaacgatcttcaatatgcttaccaagctgtgattccaaatattacgtaaatacacttgcaaaggaggatgtttttagtagcaatttgtactgatggtatggggccaagagatatatcttagagggagggctgagggtttgaagtccaactcctaagccagtgccagaagagccaaggacaggtacggctgtcatcacttagacctcaccctgtggagccacaccctagggttggccaatctactcccaggagcagggagggcaggagccagggctgggcataaaagtcagggcagagccatctattgcttacatttgcttctgacacaactgtgttcactagcaacctcaaacagacacctcgagtttcgattgctagcttcgaactcgagccaccatgcagctagagctctccacctgtgtctttctgtgtctcttgccactcggctttagtgccatcaggagatactacctgggcgcagtggaactgtcctgggactaccggcaaagtgaactcctccgtgagctgcacgtggacaccagatttcctgctacagcgccaggagctcttccgttgggcccgtcagtcctgtacaaaaagactgtgttcgtagagttcacggatcaacttttcagcgttgccaggcccaggccaccatggatgggtctgctgggtcctaccatccaggctgaggtttacgacacggtggtcgttaccctgaagaacatggcttctcatcccgttagtcttcacgctgtcggcgtctccttctggaaatcttccgaaggcgctgaatatgaggatcacaccagccaaagggagaaggaagacgataaagtccttcccggtaaaagccaaacctacgtctggcaggtcctgaaagaaaatggtccaacagcctctgacccaccatgtcttacctactcatacctgtctcacgtggacctggtgaaagacctgaattcgggcctcattggagccctgctggtttgtagagaagggagtctgaccagagaaaggacccagaacctgcacgaatttgtactactttttgctgtctttgatgaagggaaaagttggcactcagcaagaaatgactcctggacacgggccatggatcccgcacctgccagggcccagcctgcaatgcacacagtcaatggctatgtcaacaggtctctgccaggtctgatcggatgtcataagaaatcagtctactggcacgtgattggaatgggcaccagcccggaagtgcactccatttttcttgaaggccacacgtttctcgtgaggcaccatcgccaggcttccttggagatctcgccactaactttcctcactgctcagacattcctgatggaccttggccagttcctactgttttgtcatatctcttcccaccaccatggtggcatggaggctcacgtcagagtagaaagctgcgccgaggagccccagctgcggaggaaagctgatgaagaggaagattatgatgacaatttgtacgactcggacatggacgtggtccggctcgatggtgacgacgtgtctccctttatccaaatccgctcagttgccaagaagcatcctaaaacttgggtacattacattgctgctgaagaggaggactgggactatgctcccttagtcctcgcccccgatgacagaagttataaaagtcaatatttgaacaatggccctcagcggattggtaggaagtacaaaaaagtccgatttatggcatacacagatgaaacctttaagacgcgtgaagctattcagcatgaatcaggaatcttgggacctttactttatggggaagttggagacacactgttgattatatttaagaatcaagcaagcagaccatataacatctaccctcacggaatcactgatgtccgtcctttgtattcaaggagattaccaaaaggtgtaaaacatttgaaggattttccaattctgccaggagaaatattcaaatataaatggacagtgactgtagaagatgggccaactaaatcagatccgcggtgcctgacccgctattactctagtttcgttaatatggagagagatctagcttcaggactcattggccctctcctcatctgctacaaagaatctgtagatcaaagaggaaaccagataatgtcagacaagaggaatgtcatcctgttttctgtatttgatgagaaccgaagctggtacctcacagagaatatacaacgctttctccccaatccagctggagtgcagcttgaggatccagagttccaagcctccaacatcatgcacagcatcaatggctatgtttttgatagtttgcagttgtcagtttgtttgcatgaggtggcatactggtacattctaagcattggagcacagactgacttcctttctgtcttcttctctggatataccttcaaacacaaaatggtctatgaagacacactcaccctattcccattctcaggagaaactgtcttcatgtcgatggaaaacccaggtctatggattctggggtgccacaactcagactttcggaacagaggcatgaccgccttactgaaggtttctagttgtgacaagaacactggtgattattacgaggacagttatgaagatatttcagcatacttgctgagtaaaaacaatgccattgaacctaggagctttgcccagaattcaagaccccctagtgcgagcgctccaaagcctccggtcctgcgacggcatcagagggacataagccttcctacttttcagccggaggaagacaaaatggactatgatgatatcttctcaactgaaacgaagggagaagattttgacatttacggtgaggatgaaaatcaggaccctcgcagctttcagaagagaacccgacactatttcattgctgcggtggagcagctctgggattacgggatgagcgaatccccccgggcgctaagaaacagggctcagaacggagaggtgcctcggttcaagaaggtggtcttccgggaatttgctgacggctccttcacgcagccgtcgtaccgcggggaactcaacaaacacttggggctcttgggaccctacatcagagcggaagttgaagacaacatcatggtaactttcaaaaaccaggcgtctcgtccctattccttctactcgagccttatttcttatccggatgatcaggagcaaggggcagaacctcgacacaacttcgtccagccaaatgaaaccagaacttacttttggaaagtgcagcatcacatggcacccacagaagacgagtttgactgcaaagcctgggcctacttttctgatgttgacctggaaaaagatgtgcactcaggcttgatcggcccccttctgatctgccgcgccaacaccctgaacgctgctcacggtagacaagtgaccgtgcaagaatttgctctgtttttcactatttttgatgagacaaagagctggtacttcactgaaaatgtggaaaggaactgccgggccccctgccatctgcagatggaggaccccactctgaaagaaaactatcgcttccatgcaatcaatggctatgtgatggatacactccctggcttagtaatggctcagaatcaaaggatccgatggtatctgctcagcatgggcagcaatgaaaatatccattcgattcattttagcggacacgtgttcagtgtacggaaaaaggaggagtataaaatggccgtgtacaatctctatccgggtgtctttgagacagtggaaatgctaccgtccaaagttggaatttggcgaatagaatgcctgattggcgagcacctgcaagctgggatgagcacgactttcctggtgtacagcaagaagtgtcagactcccctgggaatggcttctggacacattagagattttcagattacagcttcaggacaatatggacagtgggccccaaagctggccagacttcattattccggatcaatcaatgcctggagcaccaaggagcccttttcttggatcaaggtggatctgttggcaccaatgattattcacggcatcaagacccagggtgcccgtcagaagttctccagcctctacatctctcagtttatcatcatgtatagtcttgatgggaagaagtggcagacttatcgaggaaattccactggaaccttaatggtcttctttggcaatgtggattcatctgggataaaacacaatatttttaaccctccaattattgctcgatacatccgtttgcacccaactcattatagcattcgcagcactcttcgcatggagttgatgggctgtgatttaaatagttgcagcatgccattgggaatggagagtaaagcaatatcagatgcacagattactgcttcatcctactttaccaatatgtttgccacctggtctccttcaaaagctcgacttcacctccaagggaggagtaatgcctggagacctcaggtgaataatccaaaagagtggctgcaagtggacttccagaagacaatgaaagtcacaggagtaactactcagggagtaaaatctctgcttaccagcatgtatgtgaaggagttcctcatctccagcagtcaagatggccatcagtggactctcttttttcagaatggcaaagtaaaggtttttcagggaaatcaagactccttcacacctgtggtgaactctctagacccaccgttactgactcgctaccttcgaattcacccccagagttgggtgcaccagattgccctgaggatggaggttctgggctgcgaggcacaggacctctactgagggcggccgccaccccaccagtgcaggctgcctatcagaaagtggtggctggtgtggctaatgccctggcccacaagtatcactaagctcgctttcttgctgtccaatttctattaaaggttcctttgttccctaagtccaactactaaactgggggatattatgaagggccttgagcatctggattctgcctaataaaaaacatttattttcattgcaatgatgtatttaaattatttctgaatattttactaaaaagggaatgtgggaggtcagtgcatttaaaacataaagaaatgaagagctagttcaaaccttgggaaaatacactatatcttaaactccatgaaagaaggtgaggctgcaaacagctaatgcacattggcaacagcccctgatgcctatgccttattcatccctcagaaaaggattcaagtagaggcttgatttggaggttaaagttttgctatgctgtattttacattacttattgttttagctgtcctcatgaatgtcttttcactacccatttgcttatcctgcatctctcagccttgactccactcagttctcttgcttagagataccacctttcccctgaagtgttccttccatgttttacggcgagatggtttctcctcgcctggccactcagccttagttgtctctgttgtcttatagaggtctacttgaagaaggaaaaacagggggcatggtttgactgtcctgtgagcccttcttccctgcctcccccactcacagtgacccggaatctgcagtgctagtctcccggaactatcactctttcacagtctgctttggaaggactgggcttagtatgaaaagttaggactgagaagaatttgaaagggggctttttgtagcttgatattcactactgtcttattaccctatcataggcccaccccaaatggaagtcccattcttcctcaggatgtttaagattagcattcaggaagagatcagaggtctgctggctcccttatcatgtcccttatggtgcttctggctctgcagttattagcatagtgttaccatcaaccaccttaacttcatttttcttattcaatacctagaaagcttatcgaccccatcctcactgactccgtcctggagttggatgagagataatggccttacgttgtgccaggggagggtcgggctggatttagcaagatttaccttctccaaagagcggtgctgcagtggcacagctgcccacggaggtgggggggtcaccgtccctggaggtgatgaagaactgtggggatgtggcactgagggacatggccagtgggcacggtgggtgggttggggttggtcttggggatcttggagggcttttccagccttcatgatttgacgattgtatgaacatctacatggcaattctccagctgcctgtcccagtcctactgacccagctgtatctctccaggcaagctcttccaccccttctgcttgcatccagacaccatcaaacatgcaggctcagacacagggaccagcagtgtctgtggcctttttgtgctcctctccatgctgggttttaacttgctctttgtccttctatcctatcttcttatccttaaggctgttctgaacgctgtgacttggagagtgtcccagagccctcaacacctgcatgtcccacgtccatgctgtcctgcacttccttatccccaagatctgcctctccgtgatgcactgaattggcaaacatgtgtcaccccagaccaacaatgtcacagcaaactcccccttgataggacaagggggaatggctttacactgagacaggggaggtttgggttggatatgaggaggcagtttttcccccagagggtggtgacgcactgaacaggttgcccaaggaggctgtggatgccccatccctgcaggcattcaaggccaggctggatgtggctctgggcagcctgggctgctggttgatgaccctgcacatagcagggggttggatctggatgagcactgtgctcctttgcaacccaggccgttctatgattctgtcattctaaatctctctttcagcctaaagctttttccccgtatccccccaggtgtctgcaggctcaaagagcagcgagaagcgttcagaggaaagcgatcccgtgccaccttccccgtgcccgggctgtccccgcacgctgccggctcggggatgcggggggagcgccggaccggagcggagccccgggcggctcgctgctgccccctagcgggggagggacgtaattacatccctgggggctttgggggggggctgtccctatcgattactagttttaccacatttgtagaggttttacttgctttaaaaaacctcccacacctccccctgaacctgaaacataaaatgaatgcaattgttgttgttaacttgtttattgcagcttataatggttacaaataaagcaatagcatcacaaatttcacaaataaagcatttttttcactgcattctagttgtggtttgtccaaactcatcaatgtatcttatcatgtctgctcgaagagcggccgcttcagtttcggccagcaggcggggagcccgaggtagctcccgctcccttgagccaggcccctgccagacctgagctccctcccaagcctggcttccccaaccggtggccttcatgggccagaagccattccttcacggctagccctccggagtagttgcccacggctccgctgctgcagaccactctgtggcacgggatgaggatcttgacaggattgcctctcatggcgcctcccactgctcgcgcggctttggggttgccggccagggcggccaattgctggtaagaaatcacttctccgaatttcacaaccttaagcagcttccataacacctgacgcgtgaacgactcttgctggaaaacgggatggtgaagcgctggcacggggaactcttcgatagcctcgggctggtggaaataggcattcagccaggctgtgcactgcatcaggggctccggacctccgagaaccgcagcgggggctgggacctccacggcatcagctgcagacgtccccttgcccaggagctttatttcgtgcagaccctgctcacaaccagacagctccagcttccccaaagggctgtccagtgtggtgcgtttcatttcacaatccttgtccatggtggcgaccgtctagctcacgacacctgaaatggaagaaaaaaactttgaaccactgtctgaggcttgagaatgaaccaagatccaaactcaaaaagggcaaattccaaggagaattacatcaagtgccaagctggcctaacttcagtctccacccactcagtgtggggaaactccatcgcataaaacccctccccccaacctaaagacgacgtactccaaaagctcgagaactaatcgaggtgcctggacggcgcccggtactccgtggagtcacatgaagcgacggctgaggacggaaaggcccttttcctttgtgtgggtgactcacccgcccgctctcccgagcgccgcgtcctccattttgagctccctgcagcagggccgggaagcggccatctttccgctcacgcaactggtgccgaccgggccagccttgccgcccagggcggggcgatacacggcggcgcgaggccaggcaccagagcaggccggcgagcttgagactacccccgtccgattctcggtggccgcgctcgcaggccccgcctcgccgaacatgtgcgctgggacgcacgggccccgtcgccgcccgcggccccaaaaaccgaaataccagtgtgcagatcttggcccgcatttacaagactatcttgccagaaaaaaagcgtcgcagcaggtcatcaaaaattttaaatggctagagacttatcgaaagcagcgagacaggcgcgaaggtgccaccagattcgcacgcggcggccccagcgcccaggccaggcctcaactcaagcacgaggcgaaggggctccttaagcgcaaggcctcgaactctcccacccacttccaacccgaagctcgggatcaagaatcacgtactgcagccaggggcgtggaagtaattcaaggcacgcaagggccataacccgtaaagaggccaggcccgcgggaaccacacacggcacttacctgtgttctggcggcaaacccgttgcgaaaaagaacgttcacggcgactactgcacttatatacggttctcccccaccctcgggaaaaaggcggagccagtacacgacatcactttcccagtttaccccgcgccaccttctctaggcaccggttcaattgccgacccctccccccaacttctcggggactgtgggcgatgtgcgctctgcccactgacgggcaccggagcctcacgcatgctcttctccacctcagtgatgacgagagcgggcgggtgagggggcgggaacgcagcgatctctgggttctacgttagtgggagtttaacgacggtccctgggattccccaaggcaggggcgagtccttttgtatgaattactcaactagtgatatcttaattaacaaacggccgctgcattctagttgtggtttgtccaaactcatcaatgtatcttatcatgtctggatcccatcacaaagctctgacctcaatcctatagaaaggaggaatgagccaaaattcacccaacttattgtgggaagcttgtggaaggctactcgaaatgtttgacccaagttaaacaatttaaaggcaatgctaccaaatactaattgagtgtatgttaacttctgacccactgggaatgtgatgaaagaaataaaagctgaaatgaatcattctctctactattattctgatatttcacattcttaaaataaagtggtgatcctaactgaccttaagacagggaatctttactcggattaaatgtcaggaattgtgaaaaagtgagtttaaatgtatttggctaaggtgtatgtaaacttccgacttcaactgtaggggatcctctagggccgccagtgtgatggatatctgcagaattcggcttcaggtaccgtcgacgatgtaggtcacggtctcgaagccgcggtgcgggtgccagggcgtgcccttgggctccccgggcgcgtactccacctcacccatctggtccatcatgatgaacgggtcgaggtggcggtagttgatcccggcgaacgcgcggcgcaccgggaagccctcgccctcgaaaccgctgggcgcggtggtcacggtgagcacgggacgtgcgacggcgtcggcgggtgcggatacgcggggcagcgtcagcgggttctcgacggtcacggcgggcatgtcgacaagccgaattccagcacactggcggccgttactaggtagctagctcgagccttcgaagatctcctagggaagttcctatactttctagagaataggaacttcggaataggaacttcaccggtgggtgaaaagccgaattctgcagatatcaagcttatcgataccgtcgacctcgagggggggcccggttagatccccgggtaccgagctcgaattcatctatgtcgggtgcggagaaagaggtaatgaaatggcattatgggtattatgggtctgcattaacgatagctagcctctaactcctagaccgtcagaactgctgggcccttcaagacgggctgctcacacccactcatgttaagcctggtgaggcctgtactctgttttcacaggaagaaatcctcacccagtcttccccaaacacattcccaggttgtgtcattagtgggatagagatgattattgtggggagaagagaaacatctggatggatttggttaggttgatctatagaggaagtaggtgctgcctgaggtagctgtaatagaagctaaaggtcaaaggagagggccctgtcccaatccagatgactccacttctgctggacccaggttcacaagcttaatctacatttcacctaaatttggctaacaagcccaaaatcacacaggcaaagggagaagtggaggcagaaccgaggttggaggccaccagggccaccgggcagagatcatttaagcccaaccttctcacttctccctgggctctgcctctcttaaaggaccttgtggtgtgacctcttgtaggtccctttcacactcggggcctcagtttccccactgtaaagtgaatgggtcccagctttggtaagcttatgcttacctgatgctttcttcctgggctgctcttgtagagaaaagataaatcttcttcctccatccacgagggcttctttccctgggggtgagagtaggctgaggagagccacttgcacacactcttaaagaaagtattacctgcaccagctcagtgagaggcacagatcagactgttacttgaatcaaattatgagcctccccaaatatatctatgacatttaaataggggattacttgaacatagactttgggatccggtgtggagtgcaggagactagcaaagtgaatcctgagagtagcaggtctgcacctgttggatcgagaaaggcggcctacaattctggtcaaatgagctgtgcttattgacatattctattagagagtactaccaggtcaccagtcaccagaaaggctgccagctctccaaccacctccagggaactatcctgaatggggccttaacaagcctaagagagggttggtttgggtcccaagccaatatttgctctgctttatgtcagtcatatggaacccaaaccaaccctctcctatgtgcctcaccagtcggtgcagggatcccaatttcaagtttggttttttatggtcaaagtccagcatagattaaatgaaggggtgtgatgatggtgttaaaagagaactccagaccagtttaactcttggacacacatcccatctcaccatggtgcttccaaccttccagagatgatgggctcctattttctgatgacaaagccctccacaggattgctgcctggccatcagggagtgcctctgtaactgaggctgagatcccactttcagtcctccagctgtggcccatccctgctccgcccaccgggtatggcctgtcctaggctcttaggtatggctgcattgtgaaatgatggctacagagctggcatctcctgtagtctggttcatctagtgcactacctcatagttaaaagaaatctgtttaagccactgagggtggctcctagtgccaactccaagaacaggaagcttcccttttttgggaggaggggcagatggtaacatggatcgtccaggtcaatgggagcagggcaaccacagtaagtactggacaacaacacaaaactccatgtgtggcttccatcgagtccctctccaattggtttggtcttctccgtcccatgcagcactttagcaaggggcctggctgaaggctatgaattgtgtggagcctcctcattgcagtctccaaccatctgatgctgggaaaatgtcaccaggatgcagccatgccgtgtggccaatgaaccgagaaaacaccccttttctagaatgctctaaagaggcagaataatccagaggtgaggaaggaaatactccaccagagacccaggcagttcctacaaaagccagactttccttcacctagggagtgacaagaccagtggaaaacactctcaagcagtaacccccaaatgctctgcaagccagtggcgtccagataccgcacaagcgagtgggctgtctaatcccatcatcatgatgtaaatatctctaggctgccctgggctgtgcctgaccctgtcttcagctttccacacctccacctacagcccatgcacagaaggaccacccaggaatgctgcaagtgtggcacctccagggccacccagggagaaggagggcagctatgctggtggctccaggggtggtaccttcacaccacaaagcccaaactgaggccccagatttggctgatgagggcatattggacaggggtcacttatgctcttccccattgccacctggcctctggctacctggacttggctacctgtggatcctctcacaggtgccaccatcttggctgagtctccagatgcgaggtccctgaggcagtggcaggcttctcgctaatgctgatgggattaggaatgggataggtggggagggccctggactgggccctgatgagccaagtgggtttttagaggggctactggtacatttcagggacaggacatctggtagagctaagctggggcaataaggagccactgctaatctgagagctagaaacaatcagcttctgggtcattattaattagggtagtttgggctgtgtggaagtcacgtactatatggggtagccacagctctctctacagataatctctaagacttctgattgggaccgtgtgaatgcagtagcaatatctcttcttactgccaggccctgccagtcctgcctccacgccctggctggccccccttatgatctgacccatgccaggctgccatagtatgttacttctgcattagcactccttgggacctgcctctccactgtccctcagactttaaagaactatacaaacccaaggggctcttcccaagagaattgatatgacttgaggtgattccatttctggaagtagtcactccattttctgcctcactctttcagtgcttcacagagcaggttcgaacgaaggagccatccaactaaccgtcatgttcgggcaaccgaagaagggagtggcaggatttcctttggagacttctggaattagacagcagtttaatgcaagcatctaaattctcttcctcccagagtctcattaaaactacagtaagagtttgtgttttgttttgtttttaaagacaaaatcccaccaggatagagagaataggagaggagataacagcatcataatttatgaaactaaaatgcagatagaccaggattaactgactacacagcaccaaggaagctgaatcacaagacagcagaggagaaaactggaaaggatcgtggtctatacggcagaatcttcccaagcctcaggaggaggagctctagatgttcccagatctgggaggtaaagtggaatggggggacatggtcagcgtaatggggttgggctggaagctggttaaggagcaggcagatctctgaatcccctctctgactctgtgtccccaggcatctgcctgtcccccaccctggaagaggtctggcttgaccctttgtctggtgaatttcctgctctgctttcctggtcctgctggccagatcagtggaggccactcacttcaccccacagggatgttctgtgttgccctacacctgggaactggaggtactggaggcaggctgtggtgagcttgaaagcaaaacacagagggcagtccaatctctttggccatatttcttctgcatatccaataccatgtccacaactctgctagtgtcctgatggtggtgggctctacacattcccgggaagctgaaggcagataatgaccaggacaggtcaacctctcttcttctgaaagccttcatctactaatggcctgggactcttcccttaaatgcttagattgtgtcttccactaaggttttttgctgttgctgttgtttgtttgtttgtttgtttgtttgtttgttttgagacggaatctcactctgtcgcccaggctggagtgtagtggcacaatctcagctcaccacaaccttcacctcctaggttgaagggattctcctgcctcagcctcctgagtagctaggattacaggcacatgccaccatgcctggctaatttttgtatttttagtagagacaggatttcgccatgttggccaggctggtcttgaactcctgacctcaggtgatctgcctaccttggtctcccaaagtgctgggattactggtgtgagccaccacacccggccaaggtttttgtttgtttgtttgtttgtttgttttgtattgaggcagggtatcactctggtcacccaggctggagtgcagtagtgcaatcacggctcactgaaacctccacctccctggcgggctcaggtgatcctgccacctcagcttcccaggtagctgggactacaggcttgtaccaccactcccagctaatttttgcgtttttagtagagacagggtttccccatgttgcccaggttggtctcaaactctgggctcaagcgatctgcctgcctcagcctcccaaagtgctgggattacaggtgtaagccaccgtacccggccccgccactaaggttttgaaaatgaagcaattacaagtttaagtctattaataagtgatgaagctatgtagaaaagcagaataattatcttggatcaggaaggtcacatgaggatctacttgggggttgtcaatattctatttcttgacctgatcagtgttgacagcaggttttaattttttacttctttttgtttgtttgtttttgagacggagtcttgctctgtctcccaggctggagtgcagtggtatgatctcggctcactgcaacctccgcctcctgggttcaagctgttctcctgcctcagcctccccagtagctgggattacaggcaggcaccaccacgaccagctaatttttgtatttttagtagagactgggtttcaccatcttggccaggctggtctcgaacttctgatctcgtgatccgccctccttggcctcccaaagtgctgggattacaggcttgagccagcgtgcccggcccattttttacttccttattaaactgtacatataggccttgcacacttttctgcatcaatgttatattccacaataaagggaaaaggtatatacacaacttgataccagtaatgtgaaacatatatttctacatagaaaaaaaaatgactgaaatactgcactccaatgtgttcacacagtagttgtttctggattatttatatattaaatgtttatatattgtattatgccatgaggtttgtgttttctctccacttttctgcattttccaagtttactacaaagagcacatattactcttataatcagaaagtcataaaatatatttaaaaagacaaaattgaaactaataaggatcaacacaaaacagatgagccatctgtggaaatccgcacagaatactacctaaagagattggtgacgtgcatgatctcactaggatgagcacaaagcttgccagagcctagggtctatttctagggttggctcttggaagccaggatagttgttatctctgggaagagggaggggcacacaaggggcttctaaaacattctgaatgttctatttctgaacctggttggtgggtacatgactgttggttttattattatatgttttatatactcttccgtatgtatggtgtggattccaaaaaaagatttcctttagagaaaaccagaatcacataagtagaaaatatggtgctatgttgaaggaacaactcaagtttatataaaatcatcatcatttataggcttaaaaagttgctttggaattttggtctaactgacttgtcttttctgcagcaaaccacgctccttctggacgtgctccaggcagaggggattagggtgggttcaaggctgcaagtacctagctcagcacactctcttcaggggacttagagtttgtctggtgttggctctctgagctcttgtcaggaatgccgacccttccgaggttcaggatttgaagcctgccttcccaccccagatttggtccacacagacactcaagtatgtatttcaactacaaatgacctgtactttcctattactcctctctttcatggtaacctttctggtatccttccttccctacatttatgggagggggacatcattctctgctctcctgtcactgaaggctccaccttctgtcttcttctgacccatctggttttcctggggccacctcctctccttaccaccctaacgcttttgtaacttgaggagaaatgagagatcacctagtcaggtcatcattctctgtagatgaagaggcccaatggtttgctcaagaattgccaagcgagttaaagacagagagtatgagagtcagcaagacctacagaaagcatctatctgcactgttttgcagggacttagcctttgtgtgtggactcctggaatgccacccactaagaaacattgtctgacaccaactccccacttggtaggtggggacactgaaactcatggcaggaaagggccttgccccaagccagggcagagtgtcactcatcactctcaattttcagtccagggcaccttgttgtgactatcccaaaggcagccactttccctggtctgaaagacctgaagagagaagagaagagaaggatggaaggcagagtatgcggctttgattcatttcctggtgaaaacagatctatacgagaagcaaatttcacgaaagggaagagaagaaagtgtcccatacgttgctggcctgtttcaaccttgctttgattcttgctgaaaagggtaccgtgtatttctgagttcaacatgcagaccagtgttaggaaagccactgcacctccactttagcctccagggctgtgccctgcaaatggcctgcagccttggtgcctcgctctccagactgcattttggaagatgggacagaggcttatggaagcccacattagaacgggggagcagaatgggtgagatgagggatccttgatagtgaaccagatgaaggaatggtagccaaatgccaggcctcctttgtggcttcaatccaaaggctctggagcccttccagggcagaacatcaggcatgtttacccccactgtcctcaacagtgacagaggtgcaatcttgggcagctggccattttgaaagcaacctccttaatctcaactgggaaggctccctagcaggacccctgtgttgcacacctggaggaagctagactaaccagaagctcagcacggttccatctgggatgcccaggtctgagacgaaaaaggtaactctcttttctgggtcctggcccagttgtgtctctctccacctcattctctgagatgcctgtctccccttttttgtcccatcaggaggcaagagctatcactgggccagactccaccagaagccaagccagcttgttacccagcttctcagggagcaaagaacagccttgtttctatcttatccccactgtcccctgcccctgccccacctcccagccattcagcttctggcttccccagagctgcctgcttctttgtggtcctccattccttgaaaagaccttctagtcattagtgtatataaatggccacttagcccagattacagtgaggtcaacagctggggctctgagaattgtcacacactggcacaggagaggaggctattcttccagagaatttggagggcactcccatccacttacaacaaaaagcccatccactgtgcttggcagtaggtgatctgagaaccaatggaaccaggttaatcctgtggcactgttgagtgaggagagcagtggcgggcactggaaaatatcagagacaaggcaggagacctgaaatctaggcttagctcctcatatacttggcagctgtatgacctcagacaaccagtgttacctctctaagcctcagtttcctcatgcaaaaggagggggaataacaacagagcccactgcttgggggtgttgtgaggacaggatgaaaaaacaaacagaaatccctcagtacaggattcagtgcagtggacagtcttgcaaggtctggttcagccctccacccctaccctcaccagtataaagaactctggcctacaagtcagatgacctgagttttaatctcagctttgccattagccgtgtgaacttgagaaagtccctttcctttttacatctattgggatgatcatgcattttttgtcctttattctgttaatatagtgtgttacattgattgcttttcatagactgaaccagccttgtattccagggataaatctcacttggtcatggtgtataatcctttatacaaatgttgctgggttgagtttgctagtattttgttgaagatttttatgtcttgattcataaggaatattggtgtaccttccccttttatggccacagtttccctacaatgatgtagtcgaactagacaacctccaatatctttcagtattcatgtcctctgattctgtgaaactaagaaaattaagaaatagtgattcataggcacaaggcaggcaaaacttagactccttgtagaataattaggaagccaaatattcagtgtgcttatttctcaaataaccttagtttctccagtctgccccaactccgaggcctgaatatctctagatgcttatgatggcaactaaagcctaaaagctaattcattttaaagttcttccaaatgcatagggttttatttttccagacctgggttcagatggggaatttgacaaacaatggaaagggggaaaaacaacaatctaaacactgagtgacaaagtaacaaagaaatagtctagctatcagccagtcaagccagccttggctttgctatccaaagtagtcagtctaattctaccaccagtttctgttcctgtagctgtctactgcctgccagggactctgccttcccacccacaactaccaatggaaggatgtggtgaccataccagtggctgctgacatctcctgccatgggaagcataattgcctccagcagcctcccccttagatccatcatttttgttgcacttggcctgggctgtactcccggccaatgactgaacatggtgagcatagtaatgcaggcccatttctgtgaggagcaggactcctccagtaggtgactttggctcaaggactctctattggcctggttgaacttttcctgaactgtgctactgtctgagactcttcttacccaatcctctttctcgccccaattgtcacagaccacctgcattgtggtctgagtctctccccaccttctcttgctcttccctgtttatctttcacaggcatttcccccagtacattccttgaatgtctaacccgatacgggtgcctgacttttggcagacctaagcagacaaaaaggagtacttggttacctagctcttctttctaccacaaacatcgagggaaccctttttccctcacccctctgccacacccccactgccccagtgaacaaccacagagagagctgtggtataatattaggctggtgcaaaagtaattgcggtttttgccattacttttaatggtaaaaaccgcaattacttttgcacctacctagtatttgtgtccccccaaattcatatgttgaaacctaacccacaatatgatgtcattaggaggcaagaccttgaggaggtgattagatgatggggtggagctctcctgaatgagattagtgcccttataagaagaagcccaaggaagctaccttgactcttccatcacatgagaatgcagcaagaaggcaccatctactaatcaggaagagagctctcaccagacactgaatctgccagtgtcttgatcttgaagttcccagcctccagaactatgcataatgcatttccattgtctctaagccacccagcctatggtattttgtcatagcagcctgaactgactaagacagtgagccacatgagaagtgccccaacccctcccttaagcacttggctcacagatcagtgggttcatttctgcctgagttttattgttattctgtagatttcttgggctagatatatttttctgttattttccttcttcacctcagtcatgaattggttgttttaaaaaagacaatgtaagtcatggggaaactcctgacaactctactctcctagggttcctgataaaaggggattcagttgagtcctctgatggtctctacctgccaaagtccagcagcccttagcaaacatgctgctcgtttctgtagagaaggtgctggtgtcccaccatacttctctctccctcatgaagggcttgcgacccagcaaatgggtggcttatatgggtctgtttcaaaggaagagccagctctgggaagaaaaacgatgagcataagcataacctaccactgtgcctgggaaagcagacaacttttttgatgtgtgaatatctaatgagaatggaatccatcaattaccttaaacttaggcacagtcttcaaattcaatatatgtgggatatacttttagtcagtttgtagacgttatttgtaataaataatctggcttctctaaagaaattattttaagtgtttggtttggtttgatttaatggtaaaattatatttagtggcagagaattatagcaatggtgataaactatagagtgtcataagttcatatcttattctcacatttgaagctgcctgcagatgcattcaagatgcagccagaagtcaggagactcaggctgttatttggagctcatcattttacagccttgctggactcccactttctcaggggaaaaatgtggtgttgacccagattagctctccaggccctgctgagttgggcactctgtaagctggagggtcttctattgtcttcacctaagtgtcaatcaacaacccaaatgggcatgggggaagagggagctgggccaatgcccagggtgcctggtagagagataccttgggcactggaaggcaccagcttcccagagagaagggggagggccatgaaaaagttggctgtagatgccagggacactgggactctccagctgtgtgtttgtgccttctgaagacttatgtttcattcctttggagcatgcataatcatacactgtgggatgtgttatatagattgcttgatagttcaccactgtaataaaatactgtgactggaatctgctcccagtctgcctttgatagcacttgtgcaacacacatttactgagcatttacagtgatccaggacctgtgttgtgaaaacattgatggacaaggcagatggtggagcacgtcagtgaggatttttaacaaaggctggtaagtgctataaaggaacattgtaggacactagagaacaaagaacaggagaacctgacttaggctggggtggggcgttggttagaggaggctccttggaggacatgaggtttaagctgtgacctgaggatgaatagatgttggccagtgaggttacctcaaatcgtcacttccgttttcccacgttacgtcacttcccattttaagaaaactacaattcccaacacatacaagttactccgccctaaaacctacgtcacccgccccgttcccacgccccgcgccacgtcacaaactccaccccctcattatcatattggcttcaatccaaaataaggtatattattgatgatg

SEQ ID NO: 180 - DNA, 37688 bp, Artificial Sequence
  WL-PS1
  misc_feature (2582)..(2759): 1-->178
  misc_feature (2768)..(2801): loxP
  misc_feature (2808)..(2973): 179-->344
  misc_feature (2974)..(3007): loxP
  misc_feature (3016)..(27338): 3112-->27435
  misc_feature (27393)..(29862): lambda-1 (complementary)
  misc_feature (30176)..(30390): BGH polyA
  misc_feature (30415)..(31080): copGFP (complementary)
  misc_feature (31127)..(31779): CMV (complementary)
  misc_feature (31831)..(33360): lambda-2
  misc_feature (33421)..(34756): 30544-->31879
  misc_feature (34752)..(35866): Ad5E4orf6
  misc_feature (35864)..(37686): 32972-->34794
taaacttggcgcgccctgagtgatttttctctggtcccgccgcatccataccgccagttgtttaccctcacaacgttccagtaaccgggcatgttcatcatcagtaacccgtatcgtgagcatcctctctcgtttcatcggtatcattacccccatgaacagaaatcccccttacacggaggcatcagtgaccaaacaggaaaaaaccgcccttaacatggcccgctttatcagaagccagacattaacgcttctggagaaactcaacgagctggacgcggatgaacaggcagacatctgtgaatcgcttcacgaccacgctgatgagctttaccgcagctgcctcgcgcgtttcggtgatgacggtgaaaacctctgacacatgcagctcccggagacggtcacagcttgtctgtaagcggatgccgggagcagacaagcccgtcagggcgcgtcagcgggtgttggcgggtgtcggggcgcagccatgacccagtcacgtagcgatagcggagtgtatactggcttaactatgcggcatcagagcagattgtactgagagtgcaccatatgcggtgtgaaataccgcacagatgcgtaaggagaaaataccgcatcaggcgctcttccgcttcctcgctcactgactcgctgcgctcggtcgttcggctgcggcgagcggtatcagctcactcaaaggcggtaatacggttatccacagaatcaggggataacgcaggaaagaacatgtgagcaaaaggccagcaaaaggccaggaaccgtaaaaaggccgcgttgctggcgtttttccataggctccgcccccctgacgagcatcacaaaaatcgacgctcaagtcagaggtggcgaaacccgacaggactataaagataccaggcgtttccccctggaagctccctcgtgcgctctcctgttccgaccctgccgcttaccggatacctgtccgcctttctcccttcgggaagcgtggcgctttctcatagctcacgctgtaggtatctcagttcggtgtaggtcgttcgctccaagctgggctgtgtgcacgaaccccccgttcagcccgaccgctgcgccttatccggtaactatcgtcttgagtccaacccggtaagacacgacttatcgccactggcagcagccactggtaacaggattagcagagcgaggtatgtaggcggtgctacagagttcttgaagtggtggcctaactacggctacactagaaggacagtatttggtatctgcgctctgctgaagccagttaccttcggaaaaagagttggtagctcttgatccggcaaacaaaccaccgctggtagcggtggtttttttgtttgcaagcagcagattacgcgcagaaaaaaaggatctcaagaagatcctttgatcttttctacggggtctgacgctcagtggaacgaaaactcacgttaagggattttggtcatgagattatcaaaaaggatcttcacctagatccttttaaattaaaaatgaagttttaaatcaatctaaagtatatatgagtaaacttggtctgacagttaccaatgcttaatcagtgaggcacctatctcagcgatctgtctatttcgttcatccatagttgcctgactccccgtcgtgtagataactacgatacgggagggcttaccatctggccccagtgctgcaatgataccgcgagacccacgctcaccggctccagatttatcagcaataaaccagccagccggaagggccgagcgcagaagtggtcctgcaactttatccgcctccatccagtctattaattgttgccgggaagctagagtaagtagttcgccagttaatagtttgcgcaacgttgttgccattgctgcaggcatcgtggtgtcacgctcgtcgtttggtatggcttcattcagctccggttcccaacgatcaaggcgagttacatgatcccccatgttgtgcaaaaaagcggttagctccttcggtcctccgatcgttgtcagaagtaagttggccgcagtgttatcactcatggttatggcagcactgcataattctcttactgtcatgccatccgtaagatgcttttctgtgactggtgagtactcaaccaagtcattctgagaatagtgtatgcggcgaccgagttgctcttgcccggcgtcaacacgggataataccgcgccacatagcagaactttaaaagtgctcatcattggaaaacgttcttcggggcgaaaactctcaaggatcttaccgctgttgagatccagttcgatgtaacccactcgtgcacccaactgatcttcagcatcttttactttcaccagcgtttctgggtgagcaaaaacaggaaggcaaaatgccgcaaaaaagggaataagggcgacacggaaatgttgaatactcatactcttcctttttcaatattattgaagcatttatcagggttattgtctcatgagcggatacatatttgaatgtatttagaaaaataaacaaataggggttccgcgcacatttccccgaaaagtgccacctgtctagctacgatatcctgtttaaacatcatcaataatataccttatagatggaatggtgccaatatgtaaatgaggtgattttaaaaagtgtgggccgtgtggtgattggctgtggggttaacggttaaaaggggcggcgcggccgtgggaaaatgacgttttatgggggtggagtttttttgcaagttgtcgcgggaaatgatttaaatataacttcgtatagcatacattatacgaagttatggatccttacgcataaaaaggcttcttttctcacggaactacttagttttcccacggtatttaacaggaaatgaggtagttttgaccggatgcaagtgaaaattgctgattttcgcgcgaaaactgaatgaggaagtgtttttctgaataatgtggtatttatggcagggtgataacttcgtatagcatacattatacgaagttatatttaaataggaatgtttatgccttaccagtgtaacatgaatcatgtgaaagtgttgttggaaccagatgccttttccagaatgagcctaacaggaatctttgacatgaacacgcaaatctggaagatcctgaggtatgatgatacgagatcgagggtgcgcgcatgcgaatgcggaggcaagcatgccaggttccagccggtgtgtgtagatgtgaccgaagatctcagaccggatcatttggttattgcccgcactggagcagagttcggatccagtggagaagaaactgactaaggtgagtattgggaaaactttggggtgggattttcagatggacagattgagtaaaaatttgttttttctgtcttgcagctgacatgagtggaaatgcttcttttaaggggggagtcttcagcccttatctgacagggcgtctcccatcctgggcaggagttcgtcagaatgttatgggatctactgtggatggaagacccgttcaacccgccaattcttcaacgctgacctatgctactttaagttcttcacctttggacgcagctgcagccgctgccgccgcctctgtcgccgctaacactgtgcttggaatgggttactatggaagcatcgtggctaattccacttcctctaataacccttctacactgactcaggacaagttacttgtccttttggcccagctggaggctttgacccaacgtctgggtgaactttctcagcaggtggccgagttgcgagtacaaactgagtctgctgtcggcacggcaaagtctaaataaaaaaaattccagaatcaatgaataaataaacgagcttgttgttgatttaaaatcaagtgtttttatttcatttttcgcgcacggtatgccctggaccaccgatctcgatcattgagaactcggtggattttttccagaatcctatagaggtgggattgaatgtttagatacatgggcattaggccgtctttggggtggagatagctccattgaagggattcatgctccggggtagtgttgtaaatcacccagtcataacaaggtcgcagtgcatggtgttgcacaatatcttttagaagtaggctgattgccacagataagcccttggtgtaggtgtttacaaaccggttgagctgggaggggtgcattcgaggtgaaattatgtgcattttggattggatttttaagttggcaatattgccgccaagatcccgtcttgggttcatgttatgaaggactaccaagacggtgtatccggtacatttaggaaatttatcgtgcagcttggatggaaaagcgtggaaaaatttggagacacccttgtgtcctccgagattttccatgcactcatccatgataatagcaatggggccgtgggcagcggcgcgggcaaacacgttccgtgggtctgacacatcatagttatgttcctgagttaaatcatcataagccattttaatgaatttggggcggagcgtaccagattggggtatgaatgttccttcgggccccggagcatagttcccctcacagatttgcatttcccaagctttcagttctgagggtggaatcatgtccacctggggggctatgaagaacaccgtttcgggggcgggggtgattagttgggatgatagcaagtttctgagcaattgagatttgccacatccggtggggccataaataattccgattacaggttgcaggtggtagtttagggaacggcaactgccgtcttctcgaagcaagggggccacctcgttcatcatttcccttacatgcatattttcccgcaccaaatccattaggaggcgctctcctcctagtgatagaagttcttgtagtgaggaaaagtttttcagcggttttagaccgtcagccatgggcattttggaaagagtttgctgcaaaagttctagtctgttccacagttcagtgatgtgttctatggcatctcgatccagcagacctcctcgtttcgcgggtttggacggctcctggagtagggtatgagacgatgggcgtccagcgctgccagggttcggtccttccagggtctcagtgttcgagtcagggttgtttccgtcacagtgaaggggtgtgcgcctgcttgggcgcttgccagggtgcgcttcagactcattctgctggtggagaacttctgtcgcttggcgccctgtatgtcggccaagtagcagtttaccatgagttcgtagttgagcgcctcggctgcgtggcctttggcgcggagcttacctttggaagttttcttgcataccgggcagtataggcatttcagcgcatacagcttgggcgcaaggaaaatggattctggggagtatgcatccgcgccgcaggaggcgcaaacagtttcacattccaccagccaggttaaatccggttcattggggtcaaaaacaagttttccgccatattttttgatgcgtttcttacctttggtctccataagttcgtgtcctcgttgagtgacaaacaggctgtccgtatctccgtagactgattttacaggcctcttctccagtggagtgcctcggtcttcttcgtacaggaactctgaccactctgatacaaaggcgcgcgtccaggccagcacaaaggaggctatgtgggaggggtagcgatcgttgtcaaccagggggtccaccttttccaaagtatgcaaacacatgtcaccctcttcaacatccaggaatgtgattggcttgtaggtgtatttcacgtgacctggggtccccgctgggggggtataaaagggggcggttctttgctcttcctcactgtcttccggatcgctgtccaggaacgtcagctgttggggtaggtattccctctcgaaggcgggcatgacctctgcactcaggttgtcagtttctaagaacgaggaggatttgatattgacagtgccggttgagatgcctttcatgaggttttcgtccatttggtcagaaaacacaatttttttattgtcaagtttggtggcaaatgatccatacagggcgttggataaaagtttggcaatggatcgcatggtttggttcttttccttgtccgcgcgctctttggcggcgatgttgagttggacatactcgcgtgccaggcacttccattcggggaagatagttgttaattcatctggcacgattctcacttgccaccctcgattatgcaaggtaattaaatccacactggtggccacctcgcctcgaaggggttcattggtccaacagagcctacctcctttcctagaacagaaagggggaagtgggtctagcataagttcatcgggagggtctgcatccatggtaaagattcccggaagtaaatccttatcaaaatagctgatgggagtggggtcatctaaggccatttgccattctcgagctgccagtgcgcgctcatatgggttaaggggactgccccagggcatgggatgggtgagagcagaggcatacatgccacagatgtcatagacgtagatgggatcctcaaagatgcctatgtaggttggatagcatcgcccccctctgatacttgctcgcacatagtcatatagttcatgtgatggcgctagcagccccggacccaagttggtgcgattgggtttttctgttctgtagacgatctggcgaaagatggcgtgagaattggaagagatggtgggtctttgaaaaatgttgaaatgggcatgaggtagacctacagagtctctgacaaagtgggcataagattcttgaagcttggttaccagttcggcggtgacaagtacgtctagggcgcagtagtcaagtgtttcttgaatgatgtcataacctggttggtttttcttttcccacagttcgcggttgagaaggtattcttcgcgatccttccagtactcttctagcggaaacccgtctttgtctgcacggtaagatcctagcatgtagaactgattaactgccttgtaagggcagcagcccttctctacgggtagagagtatgcttgagcagcttttcgtagcgaagcgtgagtaagggcaaaggtgtctctgaccatgactttgagaaattggtatttgaagtccatgtcgtcacaggctccctgttcccagagttggaagtctacccgtttcttgtaggcggggttgggcaaagcgaaagtaacatcattgaagagaatcttaccggctctgggcataaaattgcgagtgatgcggaaaggctgtggtacttccgctcgattgttgatcacctgggcagctaggacgatttcgtcgaaaccgttgatgttgtgtcctacgatgtataattctatgaaacgcggcgtgcctctgacgtgaggtagcttactgagctcatcaaaggttaggtctgtggggtcagataaggcgtagtgttcgagagcccattcgtgcaggtgaggatttgcatgtaggaatgatgaccaaagatctaccgccagtgctgtttgtaactggtcccgatactgacgaaaatgccggccaattgccattttttctggagtgacacagtagaaggttctggggtcttgttgccatcgatcccacttgagtttaatggctagatcgtgggccatgttgacgagacgctcttctcctgagagtttcatgaccagcatgaaaggaactagttgtttgccaaaggatcccatccaggtgtaagtttccacatcgtaggtcaggaagagtctttctgtgcgaggatgagagccgatcgggaagaactggatttcctgccaccagttggaggattggctgttgatgtgatggaagtagaagtttctgcggcgcgccgagcattcgtgtttgtgcttgtacagacggccgcagtagtcgcagcgttgcacgggttgtatctcgtgaatgagctgtacctggcttcccttgacgagaaatttcagtgggaagccgaggcctggcgattgtatctcgtgctcttctatattcgctgtatcggcctgttcatcttctgtttcgatggtggtcatgctgacgagcccccgcgggaggcaagtccagacctcggcgcgggaggggcggagctgaaggacgagagcgcgcaggctggagctgtccagagtcctgagacgctgcggactcaggttagtaggtagggacagaagattaacttgcatgatcttttccagggcgtgcgggaggttcagatggtacttgatttccacaggttcgtttgtagagacgtcaatggcttgcagggttccgtgtcctttgggcgccactaccgtacctttgttttttcttttgatcggtggtggctctcttgcttcttgcatgctcagaagcggtgacggggacgcgcgccgggcggcagcggttgttccggacccgggggcatggctggtagtggcacgtcggcgccgcgcacgggcaggttctggtattgcgctctgagaagacttgcgtgcgccaccacgcgtcgattgacgtcttgtatctgacgtctctgggtgaaagctaccggccccgtgagcttgaacctgaaagagagttcaacagaatcaatttcggtatcgttaacggcagcttgtctcagtatttcttgtacgtcaccagagttgtcctggtaggcgatctccgccatgaactgctcgatttcttcctcctgaagatctccgcgacccgctctttcgacggtggccgcgaggtcattggagatacggcccatgagttgggagaatgcattcatgcccgcctcgttccagacgcggctgtaaaccacggccccctcggagtctcttgcgcgcatcaccacctgagcgaggttaagctccacgtgtctggttaagaccgcatagttgcataggcgctgaaaaaggtagttgagtgtggtggcaatgtgttcggcgacgaagaaatacatgatccatcgtctcagcggcatttcgctaacatcgcccagagcttccaagcgctccatggcctcgtagaagtccacggcaaaattaaaaaactgggagtttcgcgcggacacggtcaattcctcctcgagaagacggatgagttcggctatggtggcccgtacttcgcgttcgaaggctcccgggatctcttcttcctcttctatctcttcttccactaacatctcttcttcgtcttcaggcgggggcggagggggcacgcggcgacgtcgacggcgcacgggcaaacggtcgatgaatcgttcaatgacctctccgcggcggcggcgcatggtttcagtgacggcgcggccgttctcgcgcggtcgcagagtaaaaacaccgccgcgcatctccttaaagtggtgactgggaggttctccgtttgggagggagagggcgctgattatacattttattaattggcccgtagggactgcgcgcagagatctgatcgtgtcaagatccacgggatctgaaaacctttcgacgaaagcgtctaaccagtcacagtcacaaggtaggctgagtacggcttcttgtgggcgggggtggttatgtgttcggtctgggtcttctgtttcttcttcatctcgggaaggtgagacgatgctgctggtgatgaaattaaagtaggcagttctaagacggcggatggtggcgaggagcaccaggtctttgggtccggcttgctggatacgcaggcgattggccattccccaagcattatcctgacatctagcaagatctttgtagtagtcttgcatgagccgttctacgggcacttcttcctcacccgttctgccatgcatacgtgtgagtccaaatccgcgcattggttgtaccagtgccaagtcagctacgactctttcggcgaggatggcttgctgtacttgggtaagggtggcttgaaagtcatcaaaatccacaaagcggtggtaagcccctgtattaatggtgtaagcacagttggccatgactgaccagttaactgtctggtgaccagggcgcacgagctcggtgtatttaaggcgcgaataggcgcgggtgtcaaagatgtaatcgttgcaggtgcgcaccagatactggtaccctataagaaaatgcggcggtggttggcggtagagaggccatcgttctgtagctggagcgccaggggcgaggtcttccaacataaggcggtgatagccgtagatgtacctggacatccaggtgattcctgcggcggtagtagaagcccgaggaaactcgcgtacgcggttccaaatgttgcgtagcggcatgaagtagttcattgtaggcacggtttgaccagtgaggcgcgcgcagtcattgatgctctatagacacggagaaaatgaaagcgttcagcgactcgactccgtagcctggaggaacgtgaacgggttgggtcgcggtgtaccccggttcgagacttgtactcgagccggccggagccgcggctaacgtggtattggcactcccgtctcgacccagcctacaaaaatccaggatacggaatcgagtcgttttgctggtttccgaatggcagggaagtgagtcctatttttttttttttttgccgctcagaatgcatcccgtgctgcgacagatgcgcccccaacaacagcccccctcgcagcagcagcagcagcaaccacaaaaggctgtccctgcaactactgcaactgccgccgtgagcggtgcgggacagcccgcctatgatctggacttggaagagggcgaaggactggcacgtctaggtgcgccttcgcccgagcggcatccgcgagttcaactgaaaaaagattctcgcgaggcgtatgtgccccaacagaacctatttagagacagaagcggcgaggagccggaggagatgcgagcttcccgctttaacgcgggtcgtgagctgcgtcacggtttggaccgaagacgagtgttgcgagacgaggatttcgaagttgatgaagtgacagggatcagtcctgccagggcacacgtggctgcagccaaccttgtatcggcttacgagcagacagtaaaggaagagcgtaacttccaaaagtcttttaataatcatgtgcgaaccctgattgcccgcgaagaagttacccttggtttgatgcatttgtgggatttgatggaagctatcattcagaaccctactagcaaacctctgaccgcccagctgtttctggtggtgcaacacagcagagacaatgaggctttcagagaggcgctgctgaacatcaccgaacccgaggggagatggttgtatgatcttatcaacattctacagagtatcatagtgcaggagcggagcctgggcctggccgagaaggtagctgccatcaattactcggttttgagcttgggaaaatattacgctcgcaaaatctacaagactccatacgttcccatagacaaggaggtgaagatagatgggttctacatgcgcatgacgctcaaggtcttgaccctgagcgatgatcttggggtgtatcgcaatgacagaatgcatcgcgcggttagcgccagcaggaggcgcgagttaagcgacagggaactgatgcacagtttgcaaagagctctgactggagctggaaccgagggtgagaattacttcgacatgggagctgacttgcagtggcagcctaatcgcagggctctgagcgccgcgacggcaggatgtgagcttccttacatagaagaggcggatgaaggcgaggaggaagagggcgagtacttggaagactgatggcacaacccgtgttttttgctagatggaacagcaagcaccggatcccgcaatgcgggcggcgctgcagagccagccgtccggcattaactcctcggacgattggacccaggccatgcaacgtatcatggcgttgacgactcgcaaccccgaagcctttagacagcaaccccaggccaaccgtctatcggccatcatggaagctgtagtgccttcccgatctaatcccactcatgagaaggtcctggccatcgtgaacgcgttggtggagaacaaagctattcgtccagatgaggccggactggtatacaacgctctcttagaacgcgtggctcgctacaacagtagcaatgtgcaaaccaatttggaccgtatgataacagatgtacgcgaagccgtgtctcagcgcgaaaggttccagcgtgatgccaacctgggttcgctggtggcgttaaatgctttcttgagtactcagcctgctaatgtgccgcgtggtcaacaggattatactaactttttaagtgctttgagactgatggtatcagaagtacctcagagcgaagtgtatcagtccggtcctgattacttctttcagactagcagacagggcttgcagacggtaaatctgagccaagcttttaaaaaccttaaaggtttgtggggagtgcatgccccggtaggagaaagagcaaccgtgtctagcttgttaactccgaactcccgcctgttattactgttggtagctcctttcaccgacagcggtagcatcgaccgtaattcctatttgggttacctactaaacctgtatcgcgaagccatagggcaaagtcaggtggacgagcagacctatcaagaaattacccaagtcagtcgcgctttgggacaggaagacactggcagtttggaagccactctgaacttcttgcttaccaatcggtctcaaaagatccctcctcaatatgctcttactgcggaggaggagaggatccttagatatgtgcagcagagcgtgggattgtttctgatgcaagagggggcaactccgactgcagcactggacatgacagcgcgaaatatggagcccagcatgtatgccagtaaccgacctttcattaacaaactgctggactacttgcacagagctgccgctatgaactctgattatttcaccaatgccatcttaaacccgcactggctgcccccacctggtttctacacgggcgaatatgacatgcccgaccctaatgacggatttctgtgggacgacgtggacagcgatgttttttcacctctttctgatcatcgcacgtggaaaaaggaaggcggtgatagaatgcattcttctgcatcgctgtccggggtcatgggtgctaccgcggctgagcccgagtctgcaagtccttttcctagtctacccttttctctacacagtgtacgtagcagcgaagtgggtagaataagtcgcccgagtttaatgggcgaagaggagtacctaaacgattccttgctcagaccggcaagagaaaaaaatttcccaaacaatggaatagaaagtttggtggataaaatgagtagatggaagacttatgctcaggatcacagagacgagcctgggatcatggggactacaagtagagcgagccgtagacgccagcgccatgacagacagaggggtcttgtgtgggacgatgaggattcggccgatgatagcagcgtgttggacttgggtgggagaggaaggggcaacccgtttgctcatttgcgccctcgcttgggtggtatgttgtgaaaaaaaataaaaaagaaaaactcaccaaggccatggcgacgagcgtacgttcgttcttctttattatctgtgtctagtataatgaggcgagtcgtgctaggcggagcggtggtgtatccggagggtcctcctccttcgtacgagagcgtgatgcagcagcagcaggcgacggcggtgatgcaatccccactggaggctccctttgtgcctccgcgatacctggcacctacggagggcagaaacagcattcgttactcggaactggcacctcagtacgataccaccaggttgtatctggtggacaacaagtcggcggacattgcttctctgaactatcagaatgaccacagcaacttcttgaccacggtggtgcagaacaatgactttacccctacggaagccagcacccagaccattaactttgatgaacgatcgcggtggggcggtcagctaaagaccatcatgcatactaacatgccaaacgtgaacgagtatatgtttagtaacaagttcaaagcgcgtgtgatggtgtccagaaaacctcccgacggtgctgcagttggggatacttatgatcacaagcaggatattttggaatatgagtggttcgagtttactttgccagaaggcaacttttcagttactatgactattgatttgatgaacaatgccatcatagataattacttgaaagtgggtagacagaatggagtgcttgaaagtgacattggtgttaagttcgacaccaggaacttcaagctgggatgggatcccgaaaccaagttgatcatgcctggagtgtatacgtatgaagccttccatcctgacattgtcttactgcctggctgcggagtggattttaccgagagtcgtttgagcaaccttcttggtatcagaaaaaaacagccatttcaagagggttttaagattttgtatgaagatttagaaggtggtaatattccggccctcttggatgtagatgcctatgagaacagtaagaaagaacaaaaagccaaaatagaagctgctacagctgctgcagaagctaaggcaaacatagttgccagcgactctacaagggttgctaacgctggagaggtcagaggagacaattttgcgccaacacctgttccgactgcagaatcattattggccgatgtgtctgaaggaacggacgtgaaactcactattcaacctgtagaaaaagatagtaagaatagaagctataatgtgttggaagacaaaatcaacacagcctatcgcagttggtatctttcgtacaattatggcgatcccgaaaaaggagtgcgttcctggacattgctcaccacctcagatgtcacctgcggagcagagcaggtttactggtcgcttccagacatgatgaaggatcctgtcactttccgctccactagacaagtcagtaactaccctgtggtgggtgcagagcttatgcccgtcttctcaaagagcttctacaacgaacaagctgtgtactcccagcagctccgccagtccacctcgcttacgcacgtcttcaaccgctttcctgagaaccagattttaatccgtccgccggcgcccaccattaccaccgtcagtgaaaacgttcctgctctcacagatcacgggaccctgccgttgcgcagcagtatccggggagtccaacgtgtgaccgttactgacgccagacgccgcacctgtccctacgtgtacaaggcactgggcatagtcgcaccgcgcgtcctttcaagccgcactttctaaaaaaaaaatgtccattcttatctcgcccagtaataacaccggttggggtctgcgcgctccaagcaagatgtacggaggcgcacgcaaacgttctacccaacatcccgtgcgtgttcgcggacattttcgcgctccatggggtgccctcaagggccgcactcgcgttcgaaccaccgtcgatgatgtaatcgatcaggtggttgccgacgcccgtaattatactcctactgcgcctacatctactgtggatgcagttattgacagtgtagtggctgacgctcgcaactatgctcgacgtaagagccggcgaaggcgcattgccagacgccaccgagctaccactgccatgcgagccgcaagagctctgctacgaagagctagacgcgtggggcgaagagccatgcttagggcggccagacgtgcagcttcgggcgccagcgccggcaggtcccgcaggcaagcagccgctgtcgcagcggcgactattgccgacatggcccaatcgcgaagaggcaatgtatactgggtgcgtgacgctgccaccggtcaacgtgtacccgtgcgcacccgtccccctcgcacttagaagatactgagcagtctccgatgttgtgtcccagcggcgaggatgtccaagcgcaaatacaaggaagaaatgctgcaggttatcgcacctgaagtctacggccaaccgttgaaggatgaaaaaaaaccccgcaaaatcaagcgggttaaaaaggacaaaaaagaagaggaagatggcgatgatgggctggcggagtttgtgcgcgagtttgccccacggcgacgcgtgcaatggcgtgggcgcaaagttcgacatgtgttgagacctggaacttcggtggtctttacacccggcgagcgttcaagcgctacttttaagcgttcctatgatgaggtgtacggggatgatgatattcttgagcaggcggctgaccgattaggcgagtttgcttatggcaagcgtagtagaataacttccaaggatgagacagtgtcaatacccttggatcatggaaatcccacccctagtcttaaaccggtcactttgcagcaagtgttacccgtaactccgcgaacaggtgttaaacgcgaaggtgaagatttgtatcccactatgcaactgatggtacccaaacgccagaagttggaggacgttttggagaaagtaaaagtggatccagatattcaacctgaggttaaagtgagacccattaagcaggtagcgcctggtctgggggtacaaactgtagacattaagattcccactgaaagtatggaagtgcaaactgaacccgcaaagcctactgccacctccactgaagtgcaaacggatccatggatgcccatgcctattacaactgacgccgccggtcccactcgaagatcccgacgaaagtacggtccagcaagtctgttgatgcccaattatgttgtacacccatctattattcctactcctggttaccgaggcactcgctactatcgcagccgaaacagtacctcccgccgtcgccgcaagacacctgcaaatcgcagtcgtcgccgtagacgcacaagcaaaccgactcccggcgccctggtgcggcaagtgtaccgcaatggtagtgcggaacctttgacactgccgcgtgcgcgttaccatccgagtatcatcacttaatcaatgttgccgctgcctccttgcagatatggccctcacttgtcgccttcgcgttcccatcactggttaccgaggaagaaactcgcgccgtagaagagggatgttgggacgcggaatgcgacgctacaggcgacggcgtgctatccgcaagcaattgcggggtggttttttaccagccttaattccaattatcgctgctgcaattggcgcgataccaggcatagcttccgtggcggttcaggcctcgcaacgacattgacattggaaaaaaaacgtataaataaaaaaaaatacaatggactctgacactcctggtcctgtgactatgttttcttagagatggaagacatcaatttttcatccttggctccgcgacacggcacgaagccgtacatgggcacctggagcgacatcggcacgagccaactgaacgggggcgccttcaattggagcagtatctggagcgggcttaaaaattttggctcaaccataaaaacatacgggaacaaagcttggaacagcagtacaggacaggcgcttagaaataaacttaaagaccagaacttccaacaaaaagtagtcgatgggatagcttccggcatcaatggagtggtagatttggctaaccaggctgtgcagaaaaagataaacagtcgtttggacccgccgccagcaaccccaggtgaaatgcaagtggaggaagaaattcctccgccagaaaaacgaggcgacaagcgtccgcgtcccgatttggaagagacgctggtgacgcgcgtagatgaaccgccttcttatgaggaagcaacgaagcttggaatgcccaccactagaccgatagccccaatggccaccggggtgatgaaaccttctcagttgcatcgacccgtcaccttggatttgccccctccccctgctgctactgctgtacccgcttctaagcctgtcgctgccccgaaaccagtcgccgtagccaggtcacgtcccgggggcgctcctcgtccaaatgcgcactggcaaaatactctgaacagcatcgtgggtctaggcgtgcaaagtgtaaaacgccgtcgctgcttttaattaaatatggagtagcgcttaacttgcctatctgtgtatatgtgtcattacacgccgtcacagcagcagaggaaaaaaggaagaggtcgtgcgtcgacgctgagttactttcaagatggccaccccatcgatgctgccccaatgggcatacatgcacatcgccggacaggatgcttcggagtacctgagtccgggtctggtgcagttcgcccgcgccacagacacctacttcaatctgggaaataagtttagaaatcccaccgtagcgccgacccacgatgtgaccaccgaccgtagccagcggctcatgttgcgcttcgtgcccgttgaccgggaggacaatacatactcttacaaagtgcggtacaccctggccgtgggcgacaacagagtgctggatatggccagcacgttctttgacattaggggcgtgttggacagaggtcccagtttcaaaccctattctggtacggcttacaactctctggctcctaaaggcgctccaaatgcatctcaatggattgcaaaaggcgtaccaactgcagcagccgcaggcaatggtgaagaagaacatgaaacagaggagaaaactgctacttacacttttgccaatgctcctgtaaaagccgaggctcaaattacaaaagagggcttaccaataggtttggagatttcagctgaaaacgaatctaaacccatctatgcagataaactttatcagccagaacctcaagtgggagatgaaacttggactgacctagacggaaaaaccgaagagtatggaggcagggctctaaagcctactactaacatgaaaccctgttacgggtcctatgcgaagcctactaatttaaaaggtggtcaggcaaaaccgaaaaactcggaaccgtcgagtgaaaaaattgaatatgatattgacatggaattttttgataactcatcgcaaagaacaaacttcagtcctaaaattgtcatgtatgcagaaaatgtaggtttggaaacgccagacactcatgtagtgtacaaacctggaacagaagacacaagttccgaagctaatttgggacaacagtctatgcccaacagacccaactacattggcttcagagataactttattggactcatgtactataacagtactggtaacatgggggtgctggctggtcaagcgtctcagttaaatgcagtggttgacttgcaggacagaaacacagaactttcttaccaactcttgcttgactctctgggcgacagaaccagatactttagcatgtggaatcaggctgtggacagttatgatcctgatgtacgtgttattgaaaatcatggtgtggaagatgaacttcccaactattgttttccactggacggcataggtgttccaacaaccagttacaaatcaatagttccaaatggagaagataataataattggaaagaacctgaagtaaatggaacaagtgagatcggacagggtaatttgtttgccatggaaattaaccttcaagccaatctatggcgaagtttcctttattccaatgtggctctgtatctcccagactcgtacaaatacaccccgtccaatgtcactcttccagaaaacaaaaacacctacgactacatgaacgggcgggtggtgccgccatctctagtagacacctatgtgaacattggtgccaggtggtctctggatgccatggacaatgtcaacccattcaaccaccaccgtaacgctggcttgcgttaccgatctatgcttctgggtaacggacgttatgtgcctttccacatacaagtgcctcaaaaattcttcgctgttaaaaacctgctgcttctcccaggctcctacacttatgagtggaactttaggaaggatgtgaacatggttctacagagttccctcggtaacgacctgcgggtagatggcgccagcatcagtttcacgagcatcaacctctatgctacttttttccccatggctcacaacaccgcttccacccttgaagccatgctgcggaatgacaccaatgatcagtcattcaacgactacctatctgcagctaacatgctctaccccattcctgccaatgcaaccaatattcccatttccattccttctcgcaactgggcggctttcagaggctggtcatttaccagactgaaaaccaaagaaactccctctttggggtctggatttgacccctactttgtctattctggttctattccctacctggatggtaccttctacctgaaccacacttttaagaaggtttccatcatgtttgactcttcagtgagctggcctggaaatgacaggttactatctcctaacgaatttgaaataaagcgcactgtggatggcgaaggctacaacgtagcccaatgcaacatgaccaaagactggttcttggtacagatgctcgccaactacaacatcggctatcagggcttctacattccagaaggatacaaagatcgcatgtattcatttttcagaaacttccagcccatgagcaggcaggtggttgatgaggtcaattacaaagacttcaaggccgtcgccataccctaccaacacaacaactctggctttgtgggttacatggctccgaccatgcgccaaggtcaaccctatcccgctaactatccctatccactcattggaacaactgccgtaaatagtgttacgcagaaaaagttcttgtgtgacagaaccatgtggcgcataccgttctcgagcaacttcatgtctatgggggcccttacagacttgggacagaatatgctctatgccaactcagctcatgctctggacatgacctttgaggtggatcccatggatgagcccaccctgctttatcttctcttcgaagttttcgacgtggtcagagtgcatcagccacaccgcggcatcatcgaggcagtctacctgcgtacaccgttctcggccggtaacgctaccacgtaagaagcttcttgcttcttgcaaatagcagctgcaaccatggcctgcggatcccaaaacggctccagcgagcaagagctcagagccattgtccaagacctgggttgcggaccctattttttgggaacctacgataagcgcttcccggggttcatggcccccgataagctcgcctgtgccattgtaaatacggccggacgtgagacggggggagagcactggttggctttcggttggaacccacgttctaacacctgctacctttttgatccttttggattctcggatgatcgtctcaaacagatttaccagtttgaatatgagggtctcctgcgccgcagcgctcttgctaccaaggaccgctgtattacgctggaaaaatctacccagaccgtgcagggcccccgttctgccgcctgcggacttttctgctgcatgttccttcacgcctttgtgcactggcctgaccgtcccatggacggaaaccccaccatgaaattgctaactggagtgccaaacaacatgcttcattctcctaaagtccagcccaccctgtgtgacaatcaaaaagcactctaccattttcttaatacccattcgccttattttcgctctcatcgtacacacatcgaaagggccactgcgttcgaccgtatggatgttcaataatgactcatgtaaacaacgtgttcaataaacatcactttatttttttacatgtatcaaggctctggattacttatttatttacaagtcgaatgggttctgacgagaatcagaatgacccgcaggcagtgatacgttgcggaactgatacttgggttgccacttgaattcgggaatcaccaacttgggaaccggtatatcgggcaggatgtcactccacagctttctggtcagctgcaaagctccaagcaggtcaggagccgaaatcttgaaatcacaattaggaccagtgctctgagcgcgagagttgcggtacaccggattgcagcactgaaacaccatcagcgacggatgtctcacgcttgccagcacggtgggatctgcaatcatgcccacatccagatcttcagcattggcaatgctgaacggggtcatcttgcaggtctgcctacccatggcgggcacccaattaggcttgtggttgcaatcgcagtgcagggggatcagtatcatcttggcctgatcctgtctgattcctggatacacggctctcatgaaagcatcatattgcttgaaagcctgctgggctttactaccctcgggataaaacatcccgcaggacctgctcgaaaactggttagcctgcacagccggcatcattcacacagcagcgggcgtcattgttggctatttgcaccacacttctgccccagcggttttgggtgattttggttcgctcgggattctcctttaaggctcgttgtccgttctcgctggccacatccatctcgataatctgctccttctgaatcataatattgccatgcaggcacttcagcttgccctcataatcattgcagccatgaggccacaacgcacagcctgtacattcccaattatggtgggcgatctgagaaaaagaatgtatcattccctgcagaaatcttcccatcatcgtgctcagtgtcttgtgactagtgaaagttaactggatgcctcggtgctcttcgtttacgtactggtgacagatgcgcttgtattgttcgtgttgctcaggcattagtttaaaacaggttctaagttcgttatccagcctgtacttctccatcagcagacacatcacttccatgcctttctcccaagcagacaccaggggcaagctaatcggattcttaacagtgcaggcagcagctcctttagccagagggtcatctttagcgatcttctcaatgcttcttttgccatccttctcaacgatgcgcacgggcgggtagctgaaacccactgctacaagttgcgcctcttctctttcttcttcgctgtcttgactgatgtcttgcatggggatatgtttggtcttccttggcttctttttggggggtatcggaggaggaggactgtcgctccgttccggagacagggaggattgtgacgtttcgctcaccattaccaactgactgtcggtagaagaacctgaccccacacggcgacaggtgtttttcttcgggggcagaggtggaggcgattgcgaagggctgcggtccgacctggaaggcggatgactggcagaaccccttccgcgttcgggggtgtgctccctgtggcggtcgcttaactgatttccttcgcggctggccattgtgttctcctaggcagagaaacaacagacatggaaactcagccattgctgtcaacatcgccacgagtgccatcacatctcgtcctcagcgacgaggaaaaggagcagagcttaagcattccaccgcccagtcctgccaccacctctaccctagaagataaggaggtcgacgcatctcatgacatgcagaataaaaaagcgaaagagtctgagacagacatcgagcaagacccgggctatgtgacaccggtggaacacgaggaagagttgaaacgctttctagagagagaggatgaaaactgcccaaaacagcgagcagataactatcaccaagatgctggaaatagggatcagaacaccgactacctcatagggcttgacggggaagacgcgctccttaaacatctagcaagacagtcgctcatagtcaaggatgcattattggacagaactgaagtgcccatcagtgtggaagagctcagctgcgcctacgagcttaaccttttttcacctcgtactccccccaaacgtcagccaaacggcacctgcgagccaaatcctcgcttaaacttttatccagcttttgctgtgccagaagtactggctacctatcacatcttttttaaaaatcaaaaaattccagtctcctgccgcgctaatcgcacccgcgccgatgccctactcaatctgggacctggttcacgcttacctgatatagcttccttggaagaggttccaaagatcttcgagggtctgggcaataatgagactcgggccgcaaatgctctgcaaaagggagaaaatggcatggatgagcatcacagcgttctggtggaattggaaggcgataatgccagactcgcagtactcaagcgaagcgtcgaggtcacacacttcgcatatcccgctgtcaacctgccccctaaagtcatgacggcggtcatggaccagttactcattaagcgcgcaagtcccctttcagaagacatgcatgacccagatgcctgtgatgagggtaaaccagtggtcagtgatgagcagctaacccgatggctgggcaccgactctccccgggatttggaagagcgtcgcaagcttatgatggccgtggtgctggttaccgtagaactagagtgtctccgacgtttctttaccgattcagaaaccttgcgcaaactcgaagagaatctgcactacacttttagacacggctttgtgcggcaggcatgcaagatatctaacgtggaactcaccaacctggtttcctacatgggtattctgcatgagaatcgcctaggacaaagcgtgctgcacagcacccttaagggggaagcccgccgtgattacatccgcgattgtgtctatctctacctgtgccacacgtggcaaaccggcatgggtgtatggcagcaatgtttagaagaacagaacttgaaagagcttgacaagctcttacagaaatctcttaaggttctgtggacagggttcgacgagcgcaccgtcgcttccgacctggcagacctcatcttcccagagcgtctcagggttactttgcgaaacggattgcctgactttatgagccagagcatgcttaacaattttcgctctttcatcctggaacgctccggtatcctgcccgccacctgctgcgcactgccctccgactttgtgcctctcacctaccgcgagtgccccccgccgctatggagtcactgctacctgttccgtctggccaactatctctcctaccactcggatgtgatcgaggatgtgagcggagacggcttgctggagtgccactgccgctgcaatctgtgcacgccccaccggtccctagcttgcaacccccagttgatgagcgaaacccagataataggcacctttgaattgcaaggccccagcagccaaggcgatgggtcttctcctgggcaaagtttaaaactgaccccgggactgtggacctccgcctacttgcgcaagtttgctccggaagattaccacccctatgaaatcaagttctatgaggaccaatcacagcctccaaaggccgaactttcggcttgcgtcatcacccagggggcaattctggcccaattgcaagccatccaaaaatcccgccaagaatttctactgaaaaagggtaagggggtctaccttgacccccagaccggcgaggaactcaacacaaggttccctcaggatgtcccaacgacgagaaaacaagaagttgaaggtgcagccgccgcccccagaagatatggaggaagattgggacagtcaggcagaggaggcggaggaggacagtctggaggacagtctggaggaagacagtttggaggaggaaaacgaggaggcagaggaggtggaagaagtaaccgccgacaaacagttatcctcggctgcggagacaagcaacagcgctaccatctccgctccgagtcgaggaacccggcggcgtcccagcagtagatgggacgagaccggacgcttcccgaacccaaccagcgcttccaagaccggtaagaaggatcggcagggatacaagtcctggcgggggcataagaatgccatcatctcctgcttgcatgagtgcgggggcaacatatccttcacgcggcgctacttgctattccaccatggggtgaactttccgcgcaatgttttgcattactaccgtcacctccacagcccctactatagccagcaaatcccgacagtctcgacagataaagacagcggcggcgacctccaacagaaaaccagcagcggcagttagaaaatacacaacaagtgcagcaacaggaggattaaagattacagccaacgagccagcgcaaacccgagagttaagaaatcggatctttccaaccctgtatgccatcttccagcagagtcggggtcaagagcaggaactgaaaataaaaaaccgatctctgcgttcgctcaccagaagttgtttgtatcacaagagcgaagatcaacttcagcgcactctcgaggacgccgaggctctcttcaacaagtactgcgcgctgactcttaaagagtaggcagcgaccgcgcttattcaaaaaaggcgggaattacatcatcctcgacatgagtaaagaaattcccacgccttacatgtggagttatcaaccccaaatgggattggcagcaggcgcctcccaggactactccacccgcatgaattggctcagcgccgggccttctatgatttctcgagttaatgatatacgcgcctaccgaaaccaaatacttttggaacagtcagctcttaccaccacgccccgccaacaccttaatcccagaaattggcccgccgccctagtgtaccaggaaagtcccgctcccaccactgtattacttcctcgagacgcccaggccgaagtccaaatgactaatgcaggtgcgcagttagctggcggctccaccctatgtcgtcacaggcctcggcataatataaaacgcctgatgatcagaggccgaggtatccagctcaacgacgagtcggtgagctctccgcttggtctacgaccagacggaatctttcagattgccggctgcgggagatcttccttcacccctcgtcaggctgttctgactttggaaagttcgtcttcgcaaccccgctcgggcggaatcgggaccgttcaatttgtagaggagtttactccctctgtctacttcaaccccttctccggatctcctgggcactacccggacgagttcataccgaacttcgacgcgattagcgagtcagtggacggctacgattgatgtctggtgacgcggctgagctatctcggctgcgacatctagaccactgccgccgctttcgctgctttgcccgggaacttattgagttcatctacttcgaactccccaaggatcaccctcaaggtccggcccacggagtgcggattactatcgaaggcaaaatagactctcgcctgcaacgaattttctcccagcggcccgtgctgatcgagcgagaccagggaaacaccacggttagtaatcaattacggggtcattagttcatagcccatatatggagttgcgatcgctgcgggccatgtcatacaccgccttcagagcagccggacctatctgcccgttcgtgccgtcgttgttaatcaccacatggttattctgctcaaacgtcccggacgcctgcgaccggctgtctgccatgctgcccggtgtaccgacataaccgccggtggcatagccgcgcatcagccggtaaagattccccacgccaatccggctggttgcctccttcgtgaagacaaactcaccacggtgaacaatccccgctggctcatatttgccgccggttcccgtaaatcctccggttgcaaaatggaatttcgccgcagcggcctgaatggctgtaccgcctgacgcggatgcgccgccaccaacagccccgccaatggcgctgccgatactcccgacaatccccaccattgcctgcttaagcagaatttctgtcatcatggacagcacggaacgggtgaagctgcgccagttctgctcactgccggtcagcatcgccgccatattctgtgcaataccatcaaaggtctgcgtggctgcactttttacctgcgacatactgtccgtggcgctctcttcccactcactccagccggacttcaggcctgccatccagttcccgcgaagctggtcttcagccgcccaggtctttttctgctctgacatgacgttattcagcgccagcggattatcgccatactgttccttcaggcgctgttccgtggcttcccgttctgcctgccggtcagtcagcccccggcttttcgcatcaatggcggcccgttttgcccgttgctgctgtgcgaatttatccgcctgctgcgccagcgcgttcaggcgctcctgatacgtaaccttgtcgccaagtgcagccagctggcgtttgtactccagcgtctcatctttatgcgccagcagggatttctcctgtgcagacagctggcgacgttgcgccgcctcctccagtaccgcgaactgactctccgccttccacaaatcccggcgctgctggctgattttctcatttgctccggcatgcttctccagcgtccggagttctgcctgaagcgtcagcagggcagcatgagcactgtcttcctgacgatcgcccgcagacaccttcacgctggactgtttcggctttttcagcgtcgcttcataatcctttttcgccgccgccatcagcgtgttgtaatccgcctgcaggattttcccgtctttcagtgccttgttcagttcttcctgacgggcggtatatttctccagcggcgtctgcagccgttcgtaagccttctgcgcctcttcggtatatttcagccgtgacgcttcggtatcgctctgctgctgcgcatttttgtcctgttgagtctgctgctcagccttctttcgggcggcttcaagcgcaagacgggccttttcacgatcatcccagtaacgcgcccgcgcttcatcgttaacaaaataatcatccttgcgcagattccagatgtcgtctgctttcttatacgcagcctctgccttaatcagcatctcctgcgcggtatcaggacgaccaatatccagcaccgcatcccacatggatttgaatgcccgcgcagtcctgtctgcccaggtctccagcgtgcccatgttctctttcaggcggcgggtctggtcatcaaaccctttcgttgcggcctcgttcgccgcctgcaatgccccggcttcatcgccggaacgctgcaactgagcaacatacgcaatctgctccgccgacacgttatggaactggcgagccatcgccgtcagccccgacgtcgggtctgtggtcagcttcccgaaggcttcagcgaccttgtccacctccacgccggatgcagaggagaaacgcgccacactctggctgatggacgcaatctgagcctcaccgcttacccccgccttaaccagtgcgctgagtgactcgctggtctggttaaacgtcagccctgccgcctgcccggctctggacaggaccagcatacgatctgccgtcagtcccgcctgattgccggaaaggaccagcgttttgttgaaatcggacagggttgagttgccctgataccaggcatacgccagcgcaccggtcgccaccgccagcgaggtggcccccaccatcggcagggtgatcgcaccggcaagccccctgaacatggggatcatcccgccgaaggagtccttcacctgccccccctgttgcagcaggatcagccacggactttgcccgcctgcaagctgcgtggccacgtcggtgaactgtgcaggcagcatacgcatggcggctttatactgcccgacggaaatccccgctttctgtgcagccagcgcctgtcggctcagcgactgttcaacgactgccgctgtttttttcgcatcactttccgtaccagaaaaatgacgcctgactctggccatctgctcgtcaaatctggccgcatccagactcaaatcaacgacgtcgactaagctctagcatttgtgaaccatcaccctaatcaagttttttggggtcgaggtgccgtaaagcactaaatcggaaccctaaagggagcccccgatttagagcttgacggggaaagccggcgaacgtggcgagaaaggaagggaagaaagcgaaaggagcgggcgctagggcgctggcaagtgtagcggtcacgctgcgcgtaaccaccacacccgccgcgcttaatgcgccgctacagggcgcgtggggataccccctagagccccagctggttctttccgcctcagaagccatagagcccaccgcatccccagcatgcctgctattgtcttcccaatcctcccccttgctgtcctgccccaccccaccccccagaatagaatgacacctactcagacaatgcgatgcaatttcctcattttattaggaaaggacagtgggagtggcaccttccagggtcaaggaaggcacgggggaggggcaaacaacagatggctggcaactagaaggcacagtcgaggctgatcagcgggtttgctagcttaggcgaaggcgatgggggtcttgaaggcgtgctggtactccacgatgcccagctcggtgttgctgtgcagctcctccacgcggcggaaggcgaacatggggcccccgttctgcaggatgctggggtggatggcgctcttgaagtgcatgtggctgtccaccacgaagctgtagtagccgccgtcgcgcaggctgaaggtgcgggcgaagctgcccaccagcacgttatcgcccatggggtgcaggtgctccacggtggcgttgctgcggatgatcttgtcggtgaagatcacgctgtcctcggggaagccggtgcccaccaccttgaagtcgccgatcacgcggccggcctcgtagcggtagctgaagctcacgtgcagcacgccgccgtcctcgtacttctcgatgcgggtgttggtgtagccgccgttgttgatggcgtgcaggaaggggttctcgtagccgctggggtaggtgccgaagtggtagaagccgtagcccatcacgtggctcagcaggtaggggctgaaggtcagggcgcctttggtgctcttcatcttgttggtcatgcggccctgctcgggggtgccctctccgccgcccaccagctcgaactccacgccgttcagggtgccggtgatgcggcactcgatcttcatggcgggcatggtggctagcctagccagcttgggtctccctatagtgagtcgtattaatttcgataagccagtaagcagtgggttctctagttagccagagagctctgcttatatagacctcccaccgtacacgcctaccgcccatttgcgtcaatggggcggagttgttacgacattttggaaagtcccgttgattttggtgccaaaacaaactcccattgacgtcaatggggtggagacttggaaatccccgtgagtcaaaccgctatccacgcccattgatgtactgccaaaaccgcatcaccatggtaatagcgatgactaatacgtagatgtactgccaagtaggaaagtcccataaggtcatgtactgggcataatgccaggcgggccatttaccgtcattgacgtcaatagggggcgtacttggcatatgatacacttgatgtactgccaagtgggcagtttaccgtaaatactccacccattgacgtcaatggaaagtccctattggcgttactatgggaacatacgtcattattgacgtcaatgggcgggggtcgttgggcggtcagccaggcgggccatttaccgtaagttatgtaacgcggaactccatatatgggctatgaactaatgaccccgtaattgattactattaataactacaataatcaatgtcaacgcgtatatctggcccgtacatcgcgaagcagcgcaaaacgcctaaccctaagcagattcttcatgcaattaagcttcgcggtgcttcttcagtacgctacggcaaatgtcatcgacgtttttatccggaaactgctgtctggctttttttgatttcagaattagcctgacgggcaatgctgcgaagggcgttttcctgctgaggtgtcattgaacaagtcccatgtcggcaagcataagcacacagaatatgaagcccgctgccagaaaaatgcattccgtggttgtcatacctggtttctctcatctgcttctgctttcgccaccatcatttccagcttttgtgaaagggatgcggctaacgtatgaaattcttcgtctgtttctactggtattggcacaaacctgattccaatttgagcaaggctatgtgccatctcgatactcgttcttaactcaacagaagatgctttgtgcatacagcccctcgtttattatttatctcctcagccagccgctgtgctttcagtggatttcggataacagaaaggccgggaaatacccagcctcgctttgtaacggagtagacgaaagtgattgcgcctacccggatattatcgtgaggatgcgtcatcgccattgctccccaaatacaaaaccaatttcagccagtgcctcgtccattttttcgatgaactccggcacgatctcgtcaaaactcgccatgtacttttcatcccgctcaatcacgacataatgcaggccttcacgcttcatacgcgggtcatagttggcaaagtaccaggcattttttcgcgtcacccacatgctgtactgcacctgggccatgtaagctgactttatggcctcgaaaccaccgagccggaacttcatgaaatcccgggaggtaaacgggcatttcagttcaaggccgttgccgtcactgcataaaccatcgggagagcaggcggtacgcatactttcgtcgcgatagatgatcggggattcagtaacattcacgccggaagtgaattcaaacagggttctggcgtcgttctcgtactgttttccccaggccagtgctttagcgttaacttccggagccacaccggtgcaaacctcagcaagcagggtgtggaagtaggacattttcatgtcaggccacttctttccggagcggggttttgctatcacgttgtgaacttctgaagcggtgatgacgccgagccgtaatttgtgccacgcatcatccccctgttcgacagctctcacatcgatcccggtacgctgcaggataatgtccggtgtcatgctgccaccttctgctctgcggctttctgtttcaggaatccaagagcttttactgcttcggcctgtgtcagttctgacgatgcacgaatgtcgcggcgaaatatctgggaacagagcggcaataagtcgtcatcccatgttttatccagggcgatcagcagagtgttaatctcctgcatggtttcatcgttaaccggagtgatgtcgcgttccggctgacgttctgcagtgtatgcagtattttcgacaatgcgctcggcttcatccttgtcatagataccagcaaatccgaagcggccgcggaacaacaacaattgcattcattttatgtttcaggttcagggggaggtgtggtcctgcgattccatcgagtgcacctacaccctgctgaagaccctatgcggcctaagagacctgctaccaatgaattaaaaaaaaatgattaataaaaaatcacttacttgaaatcagcaataaggtctctgttgaaattttctcccagcagcacctcacttccctcttcccaactctggtattctaaaccccgttcagcggcatactttctccatactttaaaggggatgtcaaattttagctcctctcctgtacccacaatcttcatgtctttcttcccagatgaccaagagagtccggctcagtgactccttcaaccctgtctacccctatgaagatgaaagcacctcccaacaccccttttataacccagggtttatttccccaaatggcttcacacaaagcccagacggagttcttactttaaaatgtttaaccccactaacaaccacaggcggatctctacagctaaaagtgggagggggacttacagtggatgacactgatggtaccttacaagaaaacatacgtgctacagcacccattactaaaaataatcactctgtagaactatccattggaaatggattagaaactcaaaacaataaactatgtgccaaattgggaaatgggttaaaatttaacaacggtgacatttgtataaaggatagtattaacaccttatggactggaataaaccctccacctaactgtcaaattgtggaaaacactaatacaaatgatggcaaacttactttagtattagtaaaaaatggagggcttgttaatggctacgtgtctctagttggtgtatcagacactgtgaaccaaatgttcacacaaaagacagcaaacatccaattaagattatattttgactcttctggaaatctattaactgaggaatcagacttaaaaattccacttaaaaataaatcttctacagcgaccagtgaaactgtagccagcagcaaagcctttatgccaagtactacagcttatcccttcaacaccactactagggatagtgaaaactacattcatggaatatgttactacatgactagttatgatagaagtctatttcccttgaacatttctataatgctaaacagccgtatgatttcttccaatgttgcctatgccatacaatttgaatggaatctaaatgcaagtgaatctccagaaagcaacatagctacgctgaccacatccccctttttcttttcttacattacagaagacgacaactaaaataaagtttaagtgtttttatttaaaatcacaaaattcgagtagttattttgcctccaccttcccatttgacagaatacacagtcctttctccccggctggccttaaaaagcatcatatcatgggtaacagacatattcttaggtgttatattccacacggtttcctgtcgagccaaacgctcatcagtgatattaataaactccccgggcagctcacttaagttcatgtcgctgtccagctgctgagccacaggctgctgtccaacttgcggttgcttaacgggcggcgaaggagaagtccacgcctacatgggggtagagtcataatcgtgcatcaggatagggcggtggtgctgcagcagcgcgcgaataaactgctgccgccgccgctccgtcctgcaggaatacaacatggcagtggtctcctcagcgatgattcgcaccgcccgcagcataaggcgccttgtcctccgggcacagcagcgcaccctgatctcacttaaatcagcacagtaactgcagcacagcaccacaatattgttcaaaatcccacagtgcaaggcgctgtatccaaagctcatggcggggaccacagaacccacgtggccatcataccacaagcgcaggtagattaagtggcgacccctcataaacacgctggacataaacattacctcttttggcatgttgtaattcaccacctcccggtaccatataaacctctgattaaacatggcgccatccaccaccatcctaaaccagctggccaaaacctgcccgccggctatacactgcagggaaccgggactggaacaatgacagtggagagcccaggactcgtaaccatggatcatcatgctcgtcatgatgtcaatgttggcacaacacaggcacacgtgcatacacttcctcaggattacaagctcctcccgcgttagaaccatatcccagggaacaacccattcctgaatcagcgtaaatcccacactgcagggaagacctcgcacgtaactcacgttgtgcattgtcaaagtgttacattcgggcagcagcggatgatcctccagtatggtagcgcgggtttctgtctcaaaaggaggtagacgatccctactgtacggagtgcgccgagacaaccgagatcgtgttggtcgtagtgtcatgccaaatggaacgccggacgtagtcattctcgtattttgtatagcaaaacgcggccctggcagaacacactcttcttcgccttctatcctgccgcttagcgtgttccgtgtgatagttcaagtacagccacactcttaagttggtcaaaagaatgctggcttcagttgtaatcaaaactccatcgcatctaattgttctgaggaaatcatccacggtagcatatgcaaatcccaaccaagcaatgcaactggattgcgtttcaagcaggagaggagagggaagagacggaagaaccatgttaatttttattccaaacgatctcgcagtacttcaaattgtagatcgcgcagatggcatctctcgcccccactgtgttggtgaaaaagcacagctaaatcaaaagaaatgcgattttcaaggtgctcaacggtggcttccaacaaagcctccacgcgcacatccaagaacaaaagaataccaaaagaaggagcattttctaactcctcaatcatcatattacattcctgcaccattcccagataattttcagctttccagccttgaattattcgtgtcagttcttgtggtaaatccaatccacacattacaaacaggtcccggagggcgccctccaccaccattcttaaacacaccctcataatgacaaaatatcttgctcctgtgtcacctgtagcgaattgagaatggcaacatcaattgacatgcccttggctctaagttcttctttaagttctagttgtaaaaactctctcatattatcaccaaactgcttagccagaagccccccgggaacaagagcaggggacgctacagtgcagtacaagcgcagacctccccaattggctccagcaaaaacaagattggaataagcatattgggaaccaccagtaatatcatcgaagttgctggaaatataatcaggcagagtttcttgtagaaattgaataaaagaaaaatttgccaaaaaaacattcaaaacctctgggatgcaaatgcaataggttaccgcgctgcgctccaacattgttagttttgaattagtctgcaaaaataaaaaaaaaacaagcgtcatatcatagtagcctgacgaacaggtggataaatcagtctttccatcacaagacaagccacagggtctccagctcgaccctcgtaaaacctgtcatcgtgattaaacaacagcaccgaaagttcctcgcggtgaccagcatgaataagtcttgatgaagcatacaatccagacatgttagcatcagttaaggagaaaaaacagccaacatagcctttgggtataattatgcttaatcgtaagtatagcaaagccacccctcgcggatacaaagtaaaaggcacaggagaataaaaaatataattatttctctgctgctgtttaggcaacgtcgcccccggtccctctaaatacacatacaaagcctcatcagccatggcttaccagagaaagtacagcgggcacacaaaccacaagctctaaagtcactctccaacctctccacaatatatatacacaagccctaaactgacgtaatgggactaaagtgtaaaaaatcccgccaaacccaacacacaccccgaaactgcgtcaccagggaaaagtacagtttcacttccgcaatcccaacaagcgtcacttcctctttctcacggtacgtcacatcccattaacttacaacgtcattttcccacggccgcgccgccccttttaaccgttaaccccacagccaatcaccacacggcccacactttttaaaatcacctcatttacatattggcaccattccatctataaggtatattattgatgatgtt

SEQ ID NO: 181 - DNA, 370 bp, Artificial Sequence
  Mutated packaging signal sequence
catcatcaataatataccttatagatggaatggtgccaatatgtaaatgaggtgattttaaaaagtgtgggccgtgtggtgattggctgtggggttaacggttaaaaggggcggcgcggccgtgggaaaatgacgttatttaaatataacttcgtatagcatacattatacgaagttatgaggtagttttgttcaggggcaagtgaaaattgacccattacgcgcgaaaactgaatgaggaagtgtttttctgaataatgtggtatttatggcagggtggagtatttgaccggatccaggtagactttgctgattttcgtggaggtttataacttcgtatagcatacattatacgaagttatatttaaat

SEQ ID NO: 182 - DNA, 137 bp, Artificial Sequence
  Ad35 ITR
catcatcaataatataccttatagatggaatggtgccaatatgtaaatgaggtgattttaaaaagtgtgggccgtgtggtgattggctgtggggttaacggttaaaaggggcggcgcggccgtgggaaaatgacgtt

SEQ ID NO: 183 - protein, 16 aa, Artificial Sequence
  XTEN linker
SGSETPGTSESATPES

SEQ ID NO: 184 - DNA, 34 bp, Artificial Sequence
  Loxp site
ataacttcgtatagcatacattatacgaagttat

SEQ ID NO: 185 - DNA, 149 bp, Artificial Sequence
  Mutated packaging signal
gaggtagttttgttcaggggcaagtgaaaattgacccattacgcgcgaaaactgaatgaggaagtgtttttctgaataatgtggtatttatggcagggtggagtatttgaccggatccaggtagactttgctgattttcgtggaggttt

SEQ ID NO: 186 - DNA, 600 bp, Artificial Sequence
  synthesized
catcatcaataatataccttattttggattgaagccaatatgataatgagggggtggagtttgtgacgtggcgcggggcgtgggaacggggcgggtgacgtagtagtgtggcggaagtgtgatgttgcaagtgtggcggaacacatgtaagcgacggatgtggcaaaagtgacgtttttggtgtgcgccggtgtacagccctaggataacttcgtatagcatacattatacgaagttatactagtacgcccgggcgtatcgatacgatatcggtccggacaggaagtgacaattttcgcgcggttttaggcggatgttgtagtaaatttgggcgtaaccgagtaagatttggccattttcgcgggaaaactgaataagaggaagtgaaatctgaataattttgtgttactcatagcgcgtaatggatccgcgttaaccggcggccgcattctagacggaattcataacttcgtatagcatacattatacgaagttatgctagccgaagcttgagctcgtcgagggatctgggcgtggttaagggtgggaaagaatatataaggtgggggtcttatgtagttttgtatctgttttgcagca

SEQ ID NO: 187 - DNA, 599 bp, Adenovirus serotype 5
catcatcaataatataccttattttggattgaagccaatatgataatgagggggtggagtttgtgacgtggcgcggggcgtgggaacggggcgggtgacgtagtagtgtggcggaagtgtgatgttgcaagtgtggcggaacacatgtaagcgacggatgtggcaaaagtgacgtttttggtgtgcgccggtgtacacaggaagtgacaattttcgcgcggttttaggcggatgttgtagtaaatttgggcgtaaccgagtaagatttggccattttcgcgggaaaactgaataagaggaagtgaaatctgaataattttgtgttactcatagcgcgtaatatttgtctagggccgcgggactttgaccgtttacgtggagactcgcccaggtgtttttctcaggtgttttccgcgttccgggtcaaagttggcgttttattattatagtcagctgacgtgtagtgtatttatacccggtgagttcctcaagaggccactcttgagtgccagcgagtagagttttctcctccgagccgctccgacaccgggactgaaaatgagacatattatctgccacggaggtgttattaccgaaga

SEQ ID NO: 188 - DNA, 600 bp, Adenovirus serotype
catcatcaataatataccttatagatggaatggtgccaatatgtaaatgaggtgattttaaaaagtgtgggccgtgtggtgattggctgtggggttaacggttaaaaggggcggcgcggccgtgggaaaatgacgttttatgggggtggagtttttttgcaagttgtcgcgggaaatgttacgcataaaaaggcttcttttctcacggaactacttagttttcccacggtatttaacaggaaatgaggtagttttgaccggatgcaagtgaaaattgctgattttcgcgcgaaaactgaatgaggaagtgtttttctgaataatgtggtatttatggcagggtggagtatttgttcagggccaggtagactttgacccattacgtggaggtttcgattaccgtgttttttacctgaatttccgcgtaccgtgtcaaagtcttctgtttttacgtaggtgtcagctgatcgctagggtatttatacctcagggtttgtgtcaagaggccactcttgagtgccagcgagaagagttttctcctctgcgccggcagtttaataataaaaaaatgagagatttgcgatttctgcctcaggaaat

SEQ ID NO: 189 - DNA, 29230 bp, Artificial Sequence
  HDAd35-T4-Ef1a-mgmt
  misc_feature (1)..(481): Ad35 5'end
  misc_feature (14126)..(14159): FRT (Complementary)
  misc_feature (14220)..(14463): pT4 LIR
  misc_feature (14491)..(15825): EF1a
  misc_feature (15843)..(16466): mgmt
  misc_feature (16484)..(16705): pA
  misc_feature (16735)..(17000): pT4 RIR
  misc_feature (17107)..(17140): FRT (Complementary)
  misc_feature (28823)..(29230): Ad35 3'end
catcatcaataatataccttatagatggaatggtgccaatatgtaaatgaggtgattttaaaaagtgtgggccgtgtggtgattggctgtggggttaacggttaaaaggggcggcgcggccgtgggaaaatgacgttttatgggggtggagtttttttgcaagttgtcgcgggaaatgttacgcataaaaaggcttcttttctcacggaactacttagttttcccacggtatttaacaggaaatgaggtagttttgaccggatgcaagtgaaaattgctgattttcgcgcgaaaactgaatgaggaagtgtttttctgaataatgtggtatttatggcagggtggagtatttgttcagggccaggtagactttgacccattacgtggaggtttcgattaccgtgttttttacctgaatttccgcgtaccgtgtcaaagtcttctgtttttacgtaggtgtcagctgatcgctagggtatttaccggtattcaaggattacatgagcttagaaatgtaattagcatagtgtgtggcatagtgtagataccaaataaatatgatctctccttctactcttgaaaatgcaaacacattcttggtggtcctaaaatagcctgtaacatggtttactcagcagcatttgctattcaaggcagatctgcctttagtcattggctgcgctcctgaacagctgtgtgaaaggctaacttttgtaaaccaaatcaaaataaaatgcagcaaaaatttgtcactgaaaggaaatcctcagtatatccttttatgaaatgaaagatccctcatccaaacttaacttttttaaaagtgcgcatttggagatatagccctttcttatgaatcctaattcaattttggccataaacacacgttgatgttccccaccccaaagcacatagcaacaagagtaggttctatattgaaaataatgacaatttaaaaacatgtacttatttcactgtatgtggacagtgtctatgattgcatcatgaagtgtcatataaccatgtacgtgtacatgagagagagatagagagagaagtggtagggtggtggtggtagaggggatggcgatagtaatcatggtaatggtagaggtgatggaggtggtaatgacggaggtaagggtggtagtgatgatggtggtggtggtaatggtggtggatgtggtggtggcaattgggatggtgggatggtggtagccatggtgatggtggtaatggtgttgatttaaagggtggtggtagtgaaggtgagggtagtggtggtggaggtggtggtgctggtagcaatagtgatggtggtgatggtgttgatgagggtgttgggatcagggtgagttcccacagtatatttcattcttgttgtaccactctgtcaacagcaccactgactgggacagaggaagaaggcacactctgaatgtgttattaacagaaacctcaaaacagtctgtctccttgtagtcattcaaaattatctttttcttacctggaaaactgaaactgaattaccgggaaaaacacaggagatttttgtttgttaatatgctgccaataaagtaattttatgtcaaatttaactacaggaaagggcaaggcattttctaagttccttagatgtcatgtggctaaaaaaaacaaaaggatggacagcagttagatactgtacacttagctgtttgaagccatatattcagaaagcagatgttgggagttggtgtttgaggactgatttcctggaggtattttatataggccaagttcattgttctaaactctaagggcttgacttgagggaggaaaagaggcaagaacatgtttagttttgctgacagcatcacatgggcagccctaaggctagacaactttagggcctgaagcttattctaggaaagaagcacctacagagtggcactgggctcccctccactatagagatgaagtcatatgacagtaaagggcaggcagggctgcctagggggcccagaactgacacttccattagaatgagcacaggccagggagagaagtggggaaccagagagaaggagctggaattctagtaggacaaacggtaagtgaacaacaagaacaagttaagagtgtgtgcagtattctttcaaagactgaaaaaatagtgatgtgatagaatggcaggtggctctgagcaggccaggagaaggactgggggcagagcatcccaggcaggagggcagcaagtgggaaggccctggggtggggcttttggactgttccagtgacgggcaggcagccagtgtgcctgtcacacaatgcaccagggaagtagtcgtgaatttgcagagggtcttgcaggctatgggaaagggattggattgtattttgtttgtagggaagccatcgggggacttaagcagaggaaggattggcttcatctctttgaaaaagttctctctggatgctgatgggaggagaaatggaaggaaaagaaacacttttaggggcaagaacttttgagaagggtggaattgggagtgtggagttggggccagctttggcacaggaggggaagctaaacacgtggccgcatgagggcctgtaattctacctgaaatgggtaccatttgttagggtaaacaaatgaaccaaatgcccagtgatacagaccaagtgttggcaaacttcttctgtgatggcccaggtagtaaatgtctcaggcttcgcaggccatgtggtctctgttgaagctctgtgtagtagacaatatgttaatgactgggcgtgactgtgtgctaataaaagtttatttacaaaaacagcccgtgggctggatttagctcacaggctgtagtttgccaacctctgacctagagcatgaactgagcatcttcttggagggaaataagttctttccaagttgccctcctcacattgcagggggccatgtaggcccattattcacagaagagtgggtgggcaacctttctggagcagaaaaacgtaaagatttcttccgtagtgcaagtaaggtgaccatttctaaaccgtgcaagtgatccagcagtcccaaaagttgtttcacttctcattgtgcgcccgttctcaggtgctccgaagcttccagtcctttgtagggacatggatgaaattggaaatcatcattctcagtaaactatcgcaagaacaaaaaaccaaacaccgcatattctcactcataggtgggaattgaacaatgagatcacatggacacgggaaggggaacatcacattctggggactgttgtggggtggggggaggggggagggatagcattgggagatatacctaatgctagatgacaagttagtgggtgcagcgcaccagtgtggcacatgtatacatatgtaactaacctgcacaatgtgcacatgtaccctaaaacttaaagtataataataaaagaaaaaaaaaaagagaggagagaaacatcatcccctccaggatacccttgggccttgttcttatagtcttgtacattgttgaacaatttgcatgggctagtggattaaagcacaccctccaccctcaggccctcaagggtctctatgataatacagtctcaccttctaccctttccatcaccatcctaggtgctatggccaaccttgaggctgccatgttaggtctatgcatttcccacctccaccacataactctctgaaggccaggtagtttcctattcatcttggtaaccccaaagcctcgtgacagggctcagctggcatctgcggatgtgaatgaaccattggagaaaatggtactctgcaaataactctgttattttcccatttcctgtgtaaggcctagagacaatgactttttaattgcaccccttcccctctgtatgacactggccttctcttgtgtccagcaatgtgggtggcctagatgatttctaagggacttctggccaagatgaacagcagctgcatcttactgagcatttactatgtgccatatactcagccacagctctaggggcatagaagcaggagctctcagggtcagggcagtgagtgagcaagcgagcacctatgccagccctgcctctggatggggacttgagagggtgatggaagcctgcagcactggagggaggcagacaaagacaggcctgtgctgagggggcccggagcaagagagagggaggcaatgacagcagagacatgcctgcgccttgggtttgagtgcccagtggtcaaatccacttccctgtggctgatgcttgcctttctaactttggaatttaggggttggagatctggtgagaaggtaggagggagatgaggaggagaagggaaaggcaggaaggaaggggagggaaaggaaaagcaaaaggggaggaggaaggtttccaacaaattattctatatcaactgcggaaatcaaaatttgttgcccaaatcttagaagctcatgtccctcctccccagaagtctggaatgcagcactccaggggtagcttataacccaaatatctatctgtaaaaagagaaacattgggctttcgagctgtggattctcagtaaaagcaagaggcctcagcctacacaggccagcccagagtttgaggaaccccaggcccacacccacagggctggcccctgggtctgcatactccctagaaatgtgcacacttctgagcctcaactctgtcctggagtctaacagcatccctctccttcctggggcagttccacctccagaaacctgttaccttgggccttatgtcaaggaaactgtgggaaagagctaggcaggaatgcagatgaggccagcatgggctcctaaaagtttagaaataggcagtgtcatgctcccaggtgcctgcataaaccagctgaaaaatggagctcccctcaccagcactctcccttcaaacagactgtgatttgcaggtcactggtttaccaagccaggctacccaggcaggacccagatgccaagcccagtggtgtcctgcaagctgagcagtgctcagttcttgcaaaaaaaggtctgtgtgaaggcaaggcctctgcctggcttctcaccccagttgggtgtctggaacaggaaggagcccttactgcagaaaaaggaggagggagcaaagggagcgaacagctgcgtgctccatggggaggatccccaaagtagaaaggcgcatacacactgcagcccttgacccagaatgctcacagctacattacagattcaggtctcctcagtgtagtggggctgctgatgagactgtggcatcctcaggggtcaggacacacattttccatcactcttctgatggcaaaaaacctctgagccaatgccaacctctgatcattaaaaaaaagtgctcacagcagtgtgtggtttaggatcatgccctgtgtggtttggaacacgtgcacaaccacaccttgttcatcaccatcccagaaaccctgacgcaggcaaagagcagagttattaaccctactttactgatgtggatactgaggcccagaggctcatgcaagttatcaataagtggcagggacagttgcctctagattaactagcccctaggatcacctgggtcttggaaggggacccataaacatgagctcccctctcttggggccagatttgcacctgtgccgcgccttcagcctgcatgaagtaggggctgctggcaaagactcaaagctgtaaatctgggttttctcttgaggcttctaagggagctgtttcgacaactcactctgttcccagctggctgcccctgcatagggttttaaagcagcctagctttctgccaggcttggcagtggacaacgctggtcagaacatcccagagagctaccagaatgaagtaagtttgcttctactctttacctgtttatgggctgtctctgccactggaatgaaaggcactgagaacagtgcctggcctgcagaaggccctggaaatacctgagctcctaatctgggaataggagtaggaagagctttggaggcagggcacctgagtttgagatctacaacttcctgcctgtgtgacattgggaaagtctccatcctttctgagcctcagtctccaccctggggaagtggaaatatcaatctctgtgacacagaagcaaatgagcgaatgtgcacaaagtaccttgcacaagagagacgctcaaacacttgcctccaggtttcaccgagaactacagagtaagatagatttgttcccagtggaggaagcctgggaataatttgcccctagactatgaattcctggggctcaagatcgagcacagggccaggcacacagaagggaccctggaaatgtggcaggaggccagagatagacaggcccttagagctcatacccatgccctctgacctcaagaagaaagaaacctgctcaaaatctcacaaagagcttgttccaaccctgaatcgagtctgaggactccttcctgagtccagcactttttctgcaagaagtatatgcctccaaagctgatgggcgcaaatcttgaaccccgtcacataaacacaaagggaggaggtgactagagctcctcctactggatatgtctaaggtcaccagtctaaagaaaagggatggatagaatgaggccagtatttttgcagccatccaaatgtccacatacgctgttacactgagggctcctctctcccccgtcttcagccctacttgcatttagaggtgagaaagatatgggctgaggggttgtttttcatcgtattgtagatggaaagcacactgcccttggggccatccaaatgtggaccttgatgtagcaccccaccttctggatggccatccttctgaaagtcactgaatttctcagactttattctctttatccataaagaaggagaataataataatccccccaccctgcccaaccactgactggttgggaagctcagaagaaatactgggcacggcatcccattgtaatctatagagtgagtcgcttcttaatattaaatggctgaacacagaagatgtgcaaaaagtactgtgtccccttcctcctccaactgaacatttcatgccctttgcaccctcattttgtctaggagctgccttatgaagggaataggtacctgctccgagctggaggaatctttgccacttatggtggggtatggactgagacagagatggcatgtgacatgcgcactgagtctcaactccatgcaggctctggagcactctcaaattggagtactaatgccttttaaattctcacactagcaatcctttgacctactgatctagggatctagggaaagaatcgtgatcttaacttcaaagggaaggacaaaatgttctgcctcctgttaaaactccatacactaagtgcagagactggatgccttattaaccttgggtagatgcccaaatgttcaaaaggtcaaactcttctgttccccagatcgccagagtcattaaccagtcacactattaaatgaatgaacagatgctgaaaaggtacttgcattactgagatttcttatggtgatggcccctgcctgatatgtattcagcattttgtagttttcaatgtgcattagagtatagtggtgatgacattggcctctgagtttgccacttcttatatctgtgactttggtcaaattgcttaatctctctgagtctcggtttcctggagataataatagcttcttcttcccagggttatcatgaggattacaggagataatgccccaaaaatgcttagtaaagtgcctagcacctagtcaatgctgaattaaaggtggttattcttacttttcgttcatttgaactttgttctcagggagggcaaaggatagacaaagccccatagctagtgaggagtagctgcaagactagaacccaggtgttctgagccctagtcttaggccaagaacaactgttacgtgagatgcacgttttccttcaagggagctcacaattatttccatgtaaattcaaggactgctaaaagagaactctcctctgggactgatatcattttatttcaagattgatttgaaacatgttttttgtttgtttgtttgttttctaggaaagaacaagagaaccagttaagctgaatgcctgaagcaaatccctgttagcgatgttttcaggatgagggagagtggtgcaagaaacgtgcttccagatgcacatggtttcctgggactagggttcagggtgtcatccctgggtgttattaagtgtcagaaggagagcaaacaagggaaacatctgagatccagctaaggctacaccctggaaatgcaagcccagctcttgcaaaggacctcctttggccactcaccttccaggccttacaataacttgtttggactgcaggtttcttggtggactcacaggccattctgcttttatttggtcaacctcagttcacaagcacccagatgctgagatcctcagcatgtgcagcagagtttcatattagcactgggtacctttctgaggctacagggataccgtacagcagcacctgtcacgtccagccaaaggagtgggctctctcaatgtcatccaatgctgtttcaactgtgaagaagaccatctgagagagttgcttttggaggctgaggcaaatttttaaaattctttgttctcctcaactggggtgaattcttggtcttctaggacagcttgaagttttagaaagagtcaagccactcagaaccaacagagaactctttcagagaacaaggtgtggcatagaggaggcagagggctgatcttgatcaaatccaaagtgtgactctaaagcaatgaatgtgaatttttggcaaagcttacaaagggctctaaaggccatctgcaaagagaagccaagcctgatcgatgaatcactagtgcggccggatatcgatcggcacgctgttgattttctcatagtaaggaacagtgggccctttcagtcccacttctgtagtctgtggtactacaaatggtgagcccatgatgttgccattcatagggttattctccagcagtaatgactggccagccactcccatagccgcggggctaggatttattgtcaatggagggacctgcagttctgcacaagcagtactaggatgagcacctgggcccattgcaagggtgacatcttcaaggcaaggcctcttaattttattagggtagcccccatcagccatgtctggaaactggaagtggtcttcttcttgtctcctcttaacagttccctgtgaatggaagagaagagaggaggagaagagaggagaggagaagggaagagaggtgacacacacacacacacacacacacacacacacagagagagagagagagagacagagagaaagagagagagagagagagaggaatttttataaaggtttggcacattaaagctaatgaacaggaaatgtgcatgataaaacagacctctcagtttaaagacttatagttgtgaaaactataaaatacagcctgtctttggaaccatagtgcttatttattcattattatgtttcatctaaactgtctaattacatttcaaataaggcattatgttgtctgtatactaaaacgggatagaacgttattcaaagggtaatctgcccacttcaaggagagttcaacaaaactatgcagaagtcactaaatgaaccatgctgccaaaggcaggcattggagagaaaactagaagtagctaaatagttttaattctttcctgtctacagacacatagattttaacgaaggaataccatagtatagaattgaacttttaggctgccttctagtcttggttaaatgcatcaggctgcagtggtaaaattgaatacaacagagcccttacaggaaagaagtagatctggatgtgttttcttggggagctgtttaaaatactgtttttgggaaagcacaagtttcagaacagtcattgtaggcatcgtattcattgttccatttatttttacacacacacacacacacacacacacacacactctcacacattgctatgtgtacacaaaaataatttggaagaacctatacccaacaatttggagtggtcatttatttgggatgactggcaattccctttctattctcttcatttctgcttgtttgtctttaacgagaacgactcataatccaaaaatttaaaaaagtataaagttatctaaataagaaattttcctctgaagatgcatcctcaggttggggagatattaaacaatgagaaaaggccccaatctgggatctgaaccttgggggagctgcccatcatttatagaagcacagcctttgggaacaaagcaaagtcactagcaatgtgagacttcctactcttcatggcttcatacagtcatccatcgctgttgtgttaatgaccatgacctgtatgttagcaggtaaatgggaaaggaagtgggggcaaaggagtatgtgcaggaatgatcaaaataaggaaaggaagagagggatctggaaatcacctgaatgccgataggtgaacaggtagaattcttttaaagcttcccccacccggtaccccccaaataacccctttccagctttggaagtttcactaggacatacagtgctcatcctctgatgtcaccttaagtttggctcttctggtttgatgagcttgtagcccactaggagctcaaggcatgcatggggccacttgccagcacgatgaggggcatgactgtcatggccaagtgaacatcaaagcagatccccagggctgtatgtctcaggccttggtgcacatcagaatcacttagaaacatccacattcctgggccctcccaccacaaactgacagcttcatccagggtgtggcccaggcatcgggagtttttccaacagctccatggctgattctcaacagaaaaccactggcccagagcaagggtggaggcagcgtggcatagggctctgaccttggccttgccactgaacctctcagagccccagtttctttatgtgtaaaatgagtgtaattatagttcttttctcatgaaggtgctctgactattaagtgaaacggggcacattgtatgacacctaatagctcctcactaactggtacccggcattataaagggcaggtatggaagggttctgggagtccaatacccttcttaaagacagagaggtctctgagacccagagaggggcaggccttacccagagttgctcagccagagggcaacaaggcccaggtcagatgcagggcccctccaccaccactcagctgcctccagacccactgccttcgccatgttgttggtaggacactgcatcgcccccacagaaggggcttgccaacttgagtgagaggacttgcacacttctttgacttttcttttgagatgcccacaatctgaacaagggcacttcaagggacagctctgtcaccaaactcatctgaggcctgaataccatgggtcaggcaggaatgggttggagaggtgtagagcaggcacaataagagggctgaggcccatgcagtcatcagtgcccactttcccaggagtctgactgggcacagcacccatagtgtccctgagctggtccatggagcagctcactaactgtttggcccacagcaggtgctcagtaaatggcagttgaacgaatcaatggacaaaggaacataaattacccaacacacagggagctcagccatttactcaatccattatggagtaacctacaaacaagccactgggtcccaaactgaaattgtgtctcttctacattctcccaaagaatccaataggttaaaaatagaaatgtatgaaatagatcaatcagggatgattgcatgtggatttgacataaggatcccctgcagggagtctgagctggcaacagtcaggcccaaagtgctgtccatgatgtctcgaactgcaagacagttttaacaatggcgaagcaatgcagaaccaggcaggccaaggagggggtgggggttggggaaaggaagggagggaaggggctgtgaggggcaatggtctggcatccctgccacgtgagcctctgaaatttgctggcagcttctatgggctcccagagctttcacttaattgttggtctgccactaacctgctgggagtaaggtgcagggatggaggaggcagggcatgaccaccagacactaaaggtaccagctggggccactggcaaagggaaggaggctgcacctctcctacatgagagcccgtatacacacaccttttccagcactcatcaactgcatcccaagcaaatggtccctgatcaattccaattctagaaaccaactgactactcaataacaaagtagatcccagcaggccgccactgctggagcggatgccacttttgctatgccaagtctgtggctggacagctgctggcatgtacactcactgactttcataaggatgcctaataaagggggcaggctcacctggcttttctcaggggtggggtttggggtgccgatagaggctgctgttttggcagagtggcaagctgcaagcctcttctgagctttcatttttcaatggacttcagtgagaattcactttgtcagaggccatgcagctccatgttttggatttcatggaatgagctttcaacagtgagcctgaagtgccctggctgaacagcaagaacaccagccaaccctaaacaaggccgaggagaggcggctgtgtttacacggaaggctcagccttgctgtaatagcgtctgccttcaccagacatcagtgaggcgtggaaatctattatccagttaattttgcccctagataaagacttgctttcgtgtcttctctttcacagtcccatgatctgttactcatctcaactgcgagaagttggctgggctttcccctgtgcccagtgccacactcgtgccttcactgggtcacctgtgcctgtggctgatgccgctgaggttttgcctgcccagactgggtgtttctgactaaatcccacagccaccattttagatcaagggcaggagatagctcactgctccggaatgacctcccctcccagaatcctggtaggggcggaaggtccccaaccaagctcccagccctttctaaatgaatctccctgcttcacccatgtgcttttctccagtctctgcggtcttgatgacagcagggtattagtcctagctgtcccacagctcctacttctttcaggcctctccctgtgacaatcagtagccactggcaggatttcctcagagcatatctcgatttgctttcagacaattagttaaaaggacactggaccccagacgtcccaactcccagccagagccctcacaggcccggcctttggtggtgaggaagggggagggagtgagtgacagtgccctggcatcttttagaaacgaattcctttctctccatacataaatgcctgcagagtcccatttcagaatccggcagacaaagccaccaatgtgatccccatgaccttataaacattcattaaaatgcatttcaaggcatgtgatggcctccccaccccctagataatgagaaaacaaaggtttctcttctgatagagacaagttcagctctgaagtcaacattatttctggttctgtctgaacaatgacatatggcaactcttccctttctatagttctagtccagaatgacaaaaaaggggaaaaatttcttagagaaggtagagattatacgaatacagtccatgaaatgagcataaggagaataaagaatataacttatccaaagaagtctggcaggctgttataaatgcttgattttggacactgtagttggaggtttaacatggacaccaataaaaaggtcagcaaagggtatgcactgttcctattgggcaagaagataggaggtcaaaggtaaccaggaaagataaactcagggagacttattttccctccagagggcactgggcttgtaggccctgggcaaaattgtcaaaaaggtgaaaatcgcctgtggtttatttagtctgctctttcttcactagtgcctcaccagttcagttcaggccaatttgctagaaggtagcgaacgatcgaccggtgaagttcctatactttctagagaataggaacttcggaataggaacttctacctagatgcatgctcagagcggcccctagctagcgtttaaaacctacagttgaagtcggaagtttacatacacttaagttggagtcattaaaactcgtttttcaactactccacaaatttcttgttaacaaacaatagttttggcaagtcagttaggacatctactttgtgcatgacacaagtcatttttccaacaattgtttacagacagattatttcacttataattcactgtatcacaattccagtgggtcagaagtgtacatacacgcgcttgactgtgcctttaagcttttaattaatggatcactagttgagtaattcatacaaaaggactcgcccctgccttggggaatcccagggaccgtcgttaaactcccactaacgtagaacccagagatcgctgcgttcccgccccctcacccgcccgctctcgtcatcactgaggtggagaagagcatgcgtgaggctccggtgcccgtcagtgggcagagcgcacatcgcccacagtccccgagaagttggggggaggggtcggcaattgaaccggtgcctagagaaggtggcgcggggtaaactgggaaagtgatgtcgtgtactggctccgcctttttcccgagggtgggggagaaccgtatataagtgcagtagtcgccgtgaacgttctttttcgcaacgggtttgccgccagaacacaggtaagtgccgtgtgtggttcccgcgggcctggcctctttacgggttatggcccttgcgtgccttgaattacttccacgcccctggctgcagtacgtgattcttgatcccgagcttcgggttggaagtgggtgggagagttcgaggccttgcgcttaaggagccccttcgcctcgtgcttgagttgaggcctggcctgggcgctggggccgccgcgtgcgaatctggtggcaccttcgcgcctgtctcgctgctttcgataagtctctagccatttaaaatttttgatgacctgctgcgacgctttttttctggcaagatagtcttgtaaatgcgggccaagatctgcacactggtatttcggtttttggggccgcgggcggcgacggggcccgtgcgtcccagcgcacatgttcggcgaggcggggcctgcgagcgcggccaccgagaatcggacgggggtagtctcaagctcgccggcctgctctggtgcctggcctcgcgccgccgtgtatcgccccgccctgggcggcaaggctggcccggtcggcaccagttgcgtgagcggaaagatggccgcttcccggccctgctgcagggagctcaaaatggaggacgcggcgctcgggagagcgggcgggtgagtcacccacacaaaggaaaagggcctttccgtcctcagccgtcgcttcatgtgactccacggagtaccgggcgccgtccaggcacctcgattagttctcgagcttttggagtacgtcgtctttaggttggggggaggggttttatgcgatggagtttccccacactgagtgggtggagactgaagttaggccagcttggcacttgatgtaattctccttggaatttgccctttttgagtttggatcttggttcattctcaagcctcagacagtggttcaaagtttttttcttccatttcaggtgtcgtgagctagacggtcgccaccatggacaaggattgtgaaatgaaacgcaccacactggacagccctttggggaagctggagctgtctggttgtgagcagggtctgcacgaaataaagctcctgggcaaggggacgtctgcagctgatgccgtggaggtcccagcccccgctgcggttctcggaggtccggagcccctgatgcagtgcacagcctggctgaatgcctatttccaccagcccgaggctatcgaagagttccccgtgccagcgcttcaccatcccgttttccagcaagagtcgttcacgcgtcaggtgttatggaagctgcttaaggttgtgaaattcggagaagtgatttcttaccagcaattggccgccctggccggcaaccccaaagccgcgcgagcagtgggaggcgccatgagaggcaatcctgtcaagatcctcatcccgtgccacagagtggtctgcagcagcggagccgtgggcaactactccggagggctagccgtgaaggaatggcttctggcccatgaaggccaccggttggggaagccaggcttgggagggagctcaggtctggcaggggcctggctcaagggagcgggagctacctcgggctccccgcctgctggccgaaactgaagcggccgctcttcgagcagacatgataagatacattgatgagtttggacaaaccacaactagaatgcagtgaaaaaaatgctttatttgtgaaatttgtgatgctattgctttatttgtaaccattataagctgcaataaacaagttaacaacaacaattgcattcattttatgtttcaggttcagggggaggtgtgggaggttttttaaagcaagtaaaacctctacaaatgtggtaaaactagtaatcgatttaattaaagatctttaaacaatttaaaggcaatgctaccaaatactaagcgcgtgtatgtacacttctgacccactgggaatgtgatgaaagaaataaaagctgaaatgaatcattctctctactattattctgatatttcacattcttaaaataaagtggtgatcctaactgaccttaagacagggaatctttactcggattaaatgtcaggaattgtgaaaaagtgagtttaaatgtatttggctaaggtgtatgtaaacttccgacttcaactgtagtttaaaacgggcccgtagtctagggccgccagtgtgatggagttcggcttcaggtacagcacactggcggccgttactaggtagctagagccttcagactctagggaagttcctatactttctagagaataggaacttcggaataggaacttcacccatggcgatcgctagcctctaactcctagaccgtcagaactgctgggcccttcaagacgggctgctcacacccactcatgttaagcctggtgaggcctgtactctgttttcacaggaagaaatcctcacccagtcttccccaaacacattcccaggttgtgtcattagtgggatagagatgattattgtggggagaagagaaacatctggatggatttggtgaggttgatctatagaggaagtaggtgctgcctgaggtagctgtaatagaagctaaaggtcaaaggagagggccctgtcccaatccagatgactccacttctgctggacccaggttcacaagcttaatctacatttcacctaaatttggctaacaagcccaaaatcacacaggcaaagggagaagtggaggcagaaccgaggttggaggccaccagggccaccgggcagagatcatttaagcccaaccttctcacttctccctgggctctgcctctcttaaaggaccttgtggtgtgacctcttgtaggtccctttcacactcggggcctcagtttccccactgtaaagtgaatgggtcccagctttggtaagcttatgcttacctgatgctttcttcctgggctgctcttgtagagaaaagataaatcttcttcctccatccacgagggctcctttccctgggggtgagagtaggctgaggagagccacttgcacacacccttaaagaaagtattacctgcaccagctcagtgagaggcacagatcagactgttacttgaatcaaattatgagcctccccaaatatatctatgacatttaaataggggattacttgaacatagactgtgggatccggtgtggagtgcgggagactagcaaagtgaatcctgagagtagcaggtctgcacctgttggatcgagaaaggcggcctacaattctggtcaaatgagctgtgcttattgacatattctattagagagtactaccaggtcaccagtcaccagaaaggctgccagctctccaaccacctccagggaactatcctgaatggggccttaacaagtctaagagagggttggtttgggtcccaagccaatatttgctctgctttatgtcagtcatatggaacccaaaccaaccctctcctatgtgcctcaccagtcggtgcagggatcccaatttcaagtttggttttttatggtcaaagtccagcatagattaaatgaaggggtgtgatgatggtgttaaaagagaactccagaccagtttaactcttggacacacatcccatctcaccatggtgcttccaaccttccagagatgatgggctcctattttctgatgacaaagccctccacaggattgctgcctggccatcagggagtgcctctgtaactgaggctgagatcccactttcagtcctccagctgtggcccatccctgctccgcccaccgggtatggcctgtcctaggctcttaggtatggctgcattgtgaaatgatggctacagagctggcatctcctgtagtctggttcatctagtgcactacctcatagttaaaagaaatctgtttaagccactgagggtggctcctagtgccaactccaagaacaggaagcttcccttttttgggaggaggggcagatggtaacatggatcgtccaggtcaatgggagcagggcaaccacagtaagtactggacaacaacacaaaactccatgtgtggcttccatcgagtccctctccaattggtttggtcttctccgtcccatgcagcactttagcaaggggcctggctgaaggctatgaattgtgtggagcctcctcattgcagtctccaaccatctgatgctgggaaaatgtcaccaggatgcagccatgccgtgtggccaatgaaccgagaaaacaccccttttctagaatgctctaaagaggcagaataatccagaggtgaggaaggaaatactccaccagagacccaggcagttcctacaaaagccagactttccttcacctagggagtgacaagaccagtggaaaacactctcaagcagtaacccccaaatgctctgcaagccagtggcgtccagataccgcacaagcgagtgggctgtctaatcccatcatcatgatgtaaatatctctaggctgccctgggctgtgcctgaccctgtcttcagctttccacacctccacctacagcccatgcacagaaggaccacccaggaatgctgcaagtgtggcacctccagggccacccagggagaaggagggcagctatgctggtggctccaggcccatttggcgggtggtaccttcacaccacaaagcccaaactgaggccccagatttggctgatgagggcatattggacaggggtcacttatgctcttccccattgccacctggcctctggctacctggacttggctacctgtggatcctctcacaggtgccaccatcttggctgagtctccagatgcgaggtccctgaggcagtggcgggcttctcgctaatgctgatgggattaggaatgggataggtggggagggccctggactgggccctgatgagccaagtgggtttttagaggggctactggtacatttcagggacaggacatctggtagagctaagctggggcaataaggagccactgctaatctgagagctagaaacaatcagcttctgggtcattattaattagggtagtttgggctgtgtggaagtcacgtactatatggggtagccacagctctctctacagataatctctaagacttctgattgggactgtgtgaatgcagtagcaatatctcttcttactgccaggccctgccagtcctgcctccacgccctggctggccccccttatgatctgacccatgccaggctgccatagtatgttacttctgcattagcactccttgggacctgcctctccactgtccctcagactttaaagaactatacaaacccaaggggctcttcccaagagaattgatatgacttgaggtgattccatttctggaagtagtcactccattttctgcctcactctttcagtgcttcacagagcaggttcgaacgaaggagccatccaactaaccgtcatgttcgggcaaccgaagaagggagtggcaggatttcctttggagacttctggaattagacagcagtttaatgcaagcatctaaattctctccctcccagagtctcattaaaactacagtaagagtttgtgttttgttttgtttttaaagacaaaatcccaccaggatagagagaataggagaggagataacagcatcataatttatgaaactaaaatgcagatagaccaggattaactgactacacagcaccaaggaagctgaatcacaagacagcagaggagaaaactggaaaggatcgtggtctatacggcagaatcttcccaagcctcaggaggaggagctctagatgttcccagatctgggaggtaaagtggaatggggggacatggtcagcgtaatggggttgggctggaagcaggttaaggagcaggcagatctctgaatcccctctctgactctgtgtccccaggcatctgcctgtcccccaccctggaagaggtctggcttgaccctttgtctggtgaatttcctgctctgctttcctggtcctgctggccggatcagtggaggccactcacttcaccccacagggatgttctgtgttgccctacacctgggaactggaggtactggaggcaggctgtggtgagcttgaaagcaaaacacagagggcagtccaatctctttggccatatttcttctgcatatccaataccatgtccacaactctgctagtgtcctgatggtggtgggctctacacattcccgggaagctgaaggcagataatgaccaggacaggtcaacctctcttcttctgaaagccttcatctactaatggcctgggactcttcccttaaatgcttagattgtgtcttccactaaggttttttgctgttgctgttgtttgtttgtttgtttgtttgtttgtttgtttgttttgagacggaatctcactctgtcgcccaggctggagtgtagtggcacaatctcagctcaccacaaccttcacctcctaggttgaaggggttctcctgcctcagcctcctgtgtagctaggattacaggcacatgccaccatgcctggctaatttttgtatttttggtagagacaggatttcgccatgttggccaggctggtcttgaactcctgacctcaggtgatctgcctaccttggtctcccaaagtgctgggattacaggtgtgagccaccacacccggccaaggtttttgtttgtttgtttgtttgtttgtttgttttgtattgaggcagggtatcactctggtcacccaggctggagtgcagtagtgcaatcacggctcactgaaacctccacctccctggcgggctcaggtgatcctgccacctcagcttcccaggtagctgggactacaggcttgtaccaccactcccagctaatttttgcgtttttagtagagacagggtttccccatgttgcccaggttggtctcaaactctgggctcaagcgatctgcctgcctcagcctcccaaagtgctgggattacaggtgtaagccaccgtacccggccccgccactaaggttttgaaaatgaagcaattacaagtttaagtctattaataagtgatgaagccatgtagaaaagcagaataattatcttggatcaggaaggtcacatgaggatctacttgggggttgtcaatattctatttcttgacctgatcagtgttgacagcaggttttaattttttacttctttttgtttgtttgtttttgagacggagtcttgctctgtctcccaggctggagtgcagtggtatgatctcggctcactgcaacctccgcctcctgggttcaagctgttctcctgcctcagcctccccagtagctgggattacaggcaggcaccaccacgaccagctaatttttgtatttttagtagagactgggtttcaccatcttggccaggctggtctcgaacttctgatctcgtgatccgccctccttggcctcccaaagtgctgggattacaggcttgagccagcgtgcccggcccattttttacttccttattaaactgtacatataggccttgcacacttttctgcatcaatgttatattccacaataaagggaaaaggtatatacacaacttgataccagtaatgtgaaacatatatttctacatagaaaaaaaaatgactgaaatactgcactccaatgtgttcacacagtagttgtttctggattatttatatattaaatgtttatatattgtattatgccatgaggtttgtgttttctctccacttttctgcattttccaagtttactacaaagagcacatattactcttataatcagaaagtcataaaatatatttaaaaagacaaaattgaaactaataaggatcaacacaaaacagatgagccatctgtggaaatccgcacagaatactacctaaagagattggtgacgtgcatgatctcactaggatgagcacaaagcttgccagagcctagggtctatttctagggttggctcttggaagccaggatagttgttatctctgggaagagggaggggcacacaaggggcttctaaaacattctgaatgttctatttctgaacctggttggtgggtacatgactgttggttttattattatatgttttatatactcttccgtatgtatggtgtggattccaaaaaaagatttcctttagagaaaaccagaatcacataagtagaaaatatggtgctatgttgaaggaacaactcaagtttatataaaatcatcatcatttataggcttaaaaagttgctttggaattttggtctaactgacttgtcttttctgcagcaaaccacgctccttctggacgtgctccaggcagaggggattagggtgggttcaaggctgcaagtacctagctcagcacactctcttcaggggacttagagtttgtctggtgttggctctctgagctcttgtcaggaatgccgacccttccgaggttcaggatttgaagcctgccttcccaccccagatttggtccacacagacactcaagtatgtatttcaactacaaatgacctgtactttcctattactcctctctttcatggtaacctttctggtatccttccttccctacatttatgggagggggacatcattctctgctctcctgtcactgaaggctccaccttctgtcttcttctgacccatctggttttcctggggccacctcctctccttaccaccctaacgcttttgtaacttgaggagaaatgagagatcacctagtcaggtcatcattctctgtagatgaagaggcccaatggtttgctcaagaattgccaagcgagttaaagacagagagtatgagagtcagcaagacctacagaaagcatctatctgcactgttttgcagggacttagcctttgtgtgtggactcctggaatgccacccactaagaaacattgtctgacaccaactccccacttggtaggtggggacactgaaactcatggcaggaaagggccttgccccaagccagggcagagtgtcactcatcactctcaattttcagtccagggcaccttgttgtgactatcccaaaggcagccactttccctggtctgaaagacctgaagagagaagagaagagaaggatggaaggcagagtatgcggctttgattcatttcctggtgaaaacagatctatacgagaagcaaatttcacgaaagggaagagaagaaagtgtcccatacgttgctggcctgtttcaaccttgctttgattcttgctgaaaagggtaccgtgtatttctgagttcaacatgcagaccagtgttaggaaagccactgcacctccactttagcctccagggctgtgccctgcaaatggcctgcagccttggtgcctcgctctccagactgcattttggaagatgggacagaggcttatggaagcccacattagaacgggggagcagaatgggtgagatgagggatccttgatagtgaaccagatgaaggaatggtagccaaatgccaggcctcctttgtggcttcaatccaaaggctctggagcccttccagggcagaacatcaggcatgtttacccccactgtcctcaacagtgacagaggtgcaatcttgggcagctggccattttgaaagcaacctccttaatctcaactgggaaggctccctagcaggacccctgtgttgcacacctggaggaagctagactaaccagaagctcagcacggttccatctgggatgcccaggtctgagacgaaaaaggtaactctcttttctgggtcctggcccagttgtgtctctctccacctcattctctgagatgcctgtctccccttttttgtcccatcaggaggcaagagctatcactgggccagactccaccagaagccaagccagcttgttacccagcttctcagggagcaaagaacagccttgtttctatcttatccccactgtcccctgcccctgccccacctcccagccattcagcttctggcttccccagagctgcctgcttctttgtggtcctccattccttgaaaagaccttctagtcattagtgtatataaatggccacttagcccagattacagtgaggtcaacagctggggctctgagaattgtcacacactggcacaggagaggaggctattcttccagagaatttggagggcactcccatccacttacaacaaaaagcccatccactgtgcttggcagtaggtgatctgagaaccaatggaaccaggttaatcctgtggcactgttgagtgaggagagcagtggcgggcactggaaaatatcagagacaaggcaggagacctgaaatctaggcttagctcctcatatacttggcagctgtatgacctcagacaaccagtgttacctctctaagcctcagtttcctcatgcaaaaggagggggaataacaacagagcccactgcttgggggtgttgtgaggacaggatgaaaaaacaaacagaaatccctcagtacaggattcagtgcagtggacagtcttgcaaggtctggttcagccctccacccctaccctcaccagtataaagaactctggcctacaagtcagatgacctgagttttaatctcagctttgccattagccgtgtgaacttgagaaagtccctttcctttttacatctattgggatgatcatgcattttttgtcctttattctgttaatatagtgtgttacattgattgcttttcatagactgaaccagccttgtattccagggataaatctcacttggtcatggtgtataatcctttatacaaatgttgctgggttgagtttgctagtattttgttgaagatttttatgtcttgattcataaggaatattggtgtaccttccccttttatggccacagtttccctacaatgatgtagtcgaactagacaacctccaatatctttcagtattcatgtcctctgattctgtgaaactaagaaaattaagaaatagtgattcataggcacaaggcaggcaaaacttagactccttgtagaataattaggaagccaaatattcagtgtgcttatttctcaaataaccttagtttctccagtctgccccaactccgaggcctgaatatctctagatgcttatgatggcaactaaagcctaaaagctaattcattttaaagttcttccaaatgcatagggttttatttttccagacctgggttcagatggggaatttgacaaacaatggaaagggggaaaaacaacaatctaaacactgagtgacaaagtaacaaagaaatagtctagctatcagccagtcaagccagccttggctttgctatccaaagtagtcagtctaattctaccaccagtttctgttcctgtagctgtctactgcctgccagggactctgccttcccacccacaactaccaatggaaggatgtggtgaccataccagtggctgctgacatctcctgccatgggaagcataattgcctccagcagcctcccccttagatccatcatttttgttgcacttggcctgggctgtactcccggccaatgactgaacatggtgagcatagtaatgcaggcccatttctgtgaggagcaggactcctccagtaggtgactttggctcaaggactctctattggcctggttgaacttttcctgaactgtgctactgtctgagactcttcttacccaatcctctttctcgccccaattgtcacagaccacctgcattgtggtctgagtctctccccaccttctcttgctcttccctgtttatctttcacaggcatttcccccagtacattccttgaatgtctaacccgatacgggtgcctgacttttggcagacctaagcagacaaaaaggagtacttggttacctagctcttctttctaccacaaacatcgagggaaccctttttccctcacccctctgccacacccccactgccccagtgaacaaccacagagagagctgtggtataatattaggctggtgcaaaagtaattgcggtttttgccattacttttaatggtaaaaaccgcaattacttttgcacctacctagtatttgtgtccccccaaattcatatgttgaaacctaacccacaatatgatgtcattaggaggcaagaccttgaggaggtgattagatgatggggtggagctctcctgaatgagattagtgcccttataagaagaagcccaaggaagctaccttgactcttccatcacatgagaatgcagcaagaaggcaccatctactaatcaggaagagagctctcaccagacactgaatctgccagtgtcttgatcttgaagttcccagcctccagaactatgcataatgcatttccattgtctctaagccacccagcctatggtattttgtcatagcagcctgaactgactaagacagtgagccacatgagaagtgccccaacccctcccttaagcacttggctcacagatcagtgggttcatttctgcctgagttttattgttattctgtagatttcttgggctagatatatttttctgttattttccttcttcacctcagtcatgaattggttgttttaaaaaagacaatgtaagtcatggggaaactcctgacaactctactctcctagggttcctgataaaaggggattcagttgagtcctctgatggtctctacctgccaaagtccagcagcccttagcaaacatgctgctcgtttctgtagagaaggtgctggtgtcccaccatacttctctctccctcatgaagggcttgcgacccagcaaatgggtggcttatatgggtctgtttcaaaggaagagccagctctgggaagaaaaacgatgagcataagcataacctaccactgtgcctgggaaagcagacaacttttttgatgtgtgaatatctaatgagaatggaatccatcaattaccttaaacttaggcacagtcttcaaattcaatatatgtgggatatacttttagtcagtttgtagacgttatttgtaataaataatctggcttctctaaagaaattattttaagtgtttggtttggtttgatttaatggtaaaattatatttagtggcagagaattatagcaatggtgataaactatagagtgtcataagttcatatcttattctcacatttgaagctgcctgcagatgcattcaagatgcagccagaagtcaggagactcaggctgttatttggagctcatcattttacagccttgctggactcccactttctcaggggaaaaatgtggtgttgacccagattagctctccaggccctgctgagttgggcactctgtaagctggagggtcttctattgtcttcacctaagtgtcaatcaacaacccaaatgggcatgggggaagagggagctgggccaatgcccagggtgcctggtagagagataccttgggcactggaaggcaccagcttcccagagagaagggggagggccatgaaaaagttggctgtagatgccagggacactgggactctccagctgtgtgtttgtgtcttctgaagacttatgtttcattcctttggagcatgcataatcatacactgtgggatgtgttatatagattgcttgatagttcaccactgtaataaaatactgtgactggaatctgctcccagtctgcctttgatagcacttgtgcaacacacatttactgagcatttacagtgatccaggacctgtgttgtgaaaacattgatggacaaggcagatggtggagcacgtcagtgaggatttttaacaaaggctggtaagtgctataaaggaacattgtaggacactagagaacaaagaacaggagaacctgacttaggctggggtggggcgttggttagaggaggctccttggaggacatgaggtttaagctgtgacctgaggatgaatagatgttggccaggtgaggtaccggtatttgtcagccttaccagtaaaaaagaaaacctattaaaaaaaaaatacacatacaaagcctcatcagccatggcttaccagagaaagtacagcgggcacacaaaccacaagctctaaagtcactctccaacctctccacaatatatatacacaagccctaaactgacgtaatgggactaaagtgtaaaaaatcccgccaaacccaacacacaccccgaaactgcgtcaccagggaaaagtacagtttcacttccgcaatcccaacaagcgtcacttcctctttctcacggtacgtcacatcccattaacttacaacgtcattttcccacggccgcgccgccccttttaaccgttaaccccacagccaatcaccacacggcccacactttttaaaatcacctcatttacatattggcaccattccatctataaggtatattattgatgatg

SEQ ID NO: 190 - DNA, 29996 bp, Artificial Sequence
  HDAd35-T4-Ef1a-mgmt-GFP
  misc_feature (1)..(481): Ad35 5'end
  misc_feature (14126)..(14159): FRT (Complementary)
  misc_feature (14220)..(14463): T4 LIR
  misc_feature (14478)..(15812): Ef1a promoter
  misc_feature (15830)..(16450): mgmt
  misc_feature (16451)..(16522): 2A
  misc_feature (16523)..(17242): GFP
  misc_feature (17269)..(17390): SV40pA
  misc_feature (17501)..(17766): pT4 RIR
  misc_feature (17873)..(17906): FRT (Complementary)
  misc_feature (29589)..(29996): Ad35 3'end
catcatcaataatataccttatagatggaatggtgccaatatgtaaatgaggtgattttaaaaagtgtgggccgtgtggtgattggctgtggggttaacggttaaaaggggcggcgcggccgtgggaaaatgacgttttatgggggtggagtttttttgcaagttgtcgcgggaaatgttacgcataaaaaggcttcttttctcacggaactacttagttttcccacggtatttaacaggaaatgaggtagttttgaccggatgcaagtgaaaattgctgattttcgcgcgaaaactgaatgaggaagtgtttttctgaataatgtggtatttatggcagggtggagtatttgttcagggccaggtagactttgacccattacgtggaggtttcgattaccgtgttttttacctgaatttccgcgtaccgtgtcaaagtcttctgtttttacgtaggtgtcagctgatcgctagggtatttaccggtattcaaggattacatgagcttagaaatgtaattagcatagtgtgtggcatagtgtagataccaaataaatatgatctctccttctactcttgaaaatgcaaacacattcttggtggtcctaaaatagcctgtaacatggtttactcagcagcatttgctattcaaggcagatctgcctttagtcattggctgcgctcctgaacagctgtgtgaaaggctaacttttgtaaaccaaatcaaaataaaatgcagcaaaaatttgtcactgaaaggaaatcctcagtatatccttttatgaaatgaaagatccctcatccaaacttaacttttttaaaagtgcgcatttggagatatagccctttcttatgaatcctaattcaattttggccataaacacacgttgatgttccccaccccaaagcacatagcaacaagagtaggttctatattgaaaataatgacaatttaaaaacatgtacttatttcactgtatgtggacagtgtctatgattgcatcatgaagtgtcatataaccatgtacgtgtacatgagagagagatagagagagaagtggtagggtggtggtggtagaggggatggcgatagtaatcatggtaatggtagaggtgatggaggtggtaatgacggaggtaagggtggtagtgatgatggtggtggtggtaatggtggtggatgtggtggtggcaattgggatggtgggatggtggtagccatggtgatggtggtaatggtgttgatttaaagggtggtggtagtgaaggtgagggtagtggtggtggaggtggtggtgctggtagcaatagtgatggtggtgatggtgttgatgagggtgttgggatcagggtgagttcccacagtatatttcattcttgttgtaccactctgtcaacagcaccactgactgggacagaggaagaaggcacactctgaatgtgttattaacagaaacctcaaaacagtctgtctccttgtagtcattcaaaattatctttttcttacctggaaaactgaaactgaattaccgggaaaaacacaggagatttttgtttgttaatatgctgccaataaagtaattttatgtcaaatttaactacaggaaagggcaaggcattttctaagttccttagatgtcatgtggctaaaaaaaacaaaaggatggacagcagttagatactgtacacttagctgtttgaagccatatattcagaaagcagatgttgggagttggtgtttgaggactgatttcctggaggtattttatataggccaagttcattgttctaaactctaagggcttgacttgagggaggaaaagaggcaagaacatgtttagttttgctgacagcatcacatgggcagccctaaggctagacaactttagggcctgaagcttattctaggaaagaagcacctacagagtggcactgggctcccctccactatagagatgaagtcatatgacagtaaagggcaggcagggctgcctagggggcccagaactgacacttccattagaatgagcacaggccagggagagaagtggggaaccagagagaaggagctggaattctagtaggacaaacggtaagtgaacaacaagaacaagttaagagtgtgtgcagtattctttcaaagactgaaaaaatagtgatgtgatagaatggcaggtggctctgagcaggccaggagaaggactgggggcagagcatcccaggcaggagggcagcaagtgggaaggccctggggtggggcttttggactgttccagtgacgggcaggcagccagtgtgcctgtcacacaatgcaccagggaagtagtcgtgaatttgcagagggtcttgcaggctatgggaaagggattggattgtattttgtttgtagggaagccatcgggggacttaagcagaggaaggattggcttcatctctttgaaaaagttctctctggatgctgatgggaggagaaatggaaggaaaagaaacacttttaggggcaagaacttttgagaagggtggaattgggagtgtggagttggggccagctttggcacaggaggggaagctaaacacgtggccgcatgagggcctgtaattctacctgaaatgggtaccatttgttagggtaaacaaatgaaccaaatgcccagtgatacagaccaagtgttggcaaacttcttctgtgatggcccaggtagtaaatgtctcaggcttcgcaggccatgtggtctctgttgaagctctgtgtagtagacaatatgttaatgactgggcgtgactgtgtgctaataaaagtttatttacaaaaacagcccgtgggctggatttagctcacaggctgtagtttgccaacctctgacctagagcatgaactgagcatcttcttggagggaaataagttctttccaagttgccctcctcacattgcagggggccatgtaggcccattattcacagaagagtgggtgggcaacctttctggagcagaaaaacgtaaagatttcttccgtagtgcaagtaaggtgaccatttctaaaccgtgcaagtgatccagcagtcccaaaagttgtttcacttctcattgtgcgcccgttctcaggtgctccgaagcttccagtcctttgtagggacatggatgaaattggaaatcatcattctcagtaaactatcgcaagaacaaaaaaccaaacaccgcatattctcactcataggtgggaattgaacaatgagatcacatggacacgggaaggggaacatcacattctggggactgttgtggggtggggggaggggggagggatagcattgggagatatacctaatgctagatgacaagttagtgggtgcagcgcaccagtgtggcacatgtatacatatgtaactaacctgcacaatgtgcacatgtaccctaaaacttaaagtataataataaaagaaaaaaaaaaagagaggagagaaacatcatcccctccaggatacccttgggccttgttcttatagtcttgtacattgttgaacaatttgcatgggctagtggattaaagcacaccctccaccctcaggccctcaagggtctctatgataatacagtctcaccttctaccctttccatcaccatcctaggtgctatggccaaccttgaggctgccatgttaggtctatgcatttcccacctccaccacataactctctgaaggccaggtagtttcctattcatcttggtaaccccaaagcctcgtgacagggctcagctggcatctgcggatgtgaatgaaccattggagaaaatggtactctgcaaataactctgttattttcccatttcctgtgtaaggcctagagacaatgactttttaattgcaccccttcccctctgtatgacactggccttctcttgtgtccagcaatgtgggtggcctagatgatttctaagggacttctggccaagatgaacagcagctgcatcttactgagcatttactatgtgccatatactcagccacagctctaggggcatagaagcaggagctctcagggtcagggcagtgagtgagcaagcgagcacctatgccagccctgcctctggatggggacttgagagggtgatggaagcctgcagcactggagggaggcagacaaagacaggcctgtgctgagggggcccggagcaagagagagggaggcaatgacagcagagacatgcctgcgccttgggtttgagtgcccagtggtcaaatccacttccctgtggctgatgcttgcctttctaactttggaatttaggggttggagatctggtgagaaggtaggagggagatgaggaggagaagggaaaggcaggaaggaaggggagggaaaggaaaagcaaaaggggaggaggaaggtttccaacaaattattctatatcaactgcggaaatcaaaatttgttgcccaaatcttagaagctcatgtccctcctccccagaagtctggaatgcagcactccaggggtagcttataacccaaatatctatctgtaaaaagagaaacattgggctttcgagctgtggattctcagtaaaagcaagaggcctcagcctacacaggccagcccagagtttgaggaaccccaggcccacacccacagggctggcccctgggtctgcatactccctagaaatgtgcacacttctgagcctcaactctgtcctggagtctaacagcatccctctccttcctggggcagttccacctccagaaacctgttaccttgggccttatgtcaaggaaactgtgggaaagagctaggcaggaatgcagatgaggccagcatgggctcctaaaagtttagaaataggcagtgtcatgctcccaggtgcctgcataaaccagctgaaaaatggagctcccctcaccagcactctcccttcaaacagactgtgatttgcaggtcactggtttaccaagccaggctacccaggcaggacccagatgccaagcccagtggtgtcctgcaagctgagcagtgctcagttcttgcaaaaaaaggtctgtgtgaaggcaaggcctctgcctggcttctcaccccagttgggtgtctggaacaggaaggagcccttactgcagaaaaaggaggagggagcaaagggagcgaacagctgcgtgctccatggggaggatccccaaagtagaaaggcgcatacacactgcagcccttgacccagaatgctcacagctacattacagattcaggtctcctcagtgtagtggggctgctgatgagactgtggcatcctcaggggtcaggacacacattttccatcactcttctgatggcaaaaaacctctgagccaatgccaacctctgatcattaaaaaaaagtgctcacagcagtgtgtggtttaggatcatgccctgtgtggtttggaacacgtgcacaaccacaccttgttcatcaccatcccagaaaccctgacgcaggcaaagagcagagttattaaccctactttactgatgtggatactgaggcccagaggctcatgcaagttatcaataagtggcagggacagttgcctctagattaactagcccctaggatcacctgggtcttggaaggggacccataaacatgagctcccctctcttggggccagatttgcacctgtgccgcgccttcagcctgcatgaagtaggggctgctggcaaagactcaaagctgtaaatctgggttttctcttgaggcttctaagggagctgtttcgacaactcactctgttcccagctggctgcccctgcatagggttttaaagcagcctagctttctgccaggcttggcagtggacaacgctggtcagaacatcccagagagctaccagaatgaagtaagtttgcttctactctttacctgtttatgggctgtctctgccactggaatgaaaggcactgagaacagtgcctggcctgcagaaggccctggaaatacctgagctcctaatctgggaataggagtaggaagagctttggaggcagggcacctgagtttgagatctacaacttcctgcctgtgtgacattgggaaagtctccatcctttctgagcctcagtctccaccctggggaagtggaaatatcaatctctgtgacacagaagcaaatgagcgaatgtgcacaaagtaccttgcacaagagagacgctcaaacacttgcctccaggtttcaccgagaactacagagtaagatagatttgttcccagtggaggaagcctgggaataatttgcccctagactatgaattcctggggctcaagatcgagcacagggccaggcacacagaagggaccctggaaatgtggcaggaggccagagatagacaggcccttagagctcatacccatgccctctgacctcaagaagaaagaaacctgctcaaaatctcacaaagagcttgttccaaccctgaatcgagtctgaggactccttcctgagtccagcactttttctgcaagaagtatatgcctccaaagctgatgggcgcaaatcttgaaccccgtcacataaacacaaagggaggaggtgactagagctcctcctactggatatgtctaaggtcaccagtctaaagaaaagggatggatagaatgaggccagtatttttgcagccatccaaatgtccacatacgctgttacactgagggctcctctctcccccgtcttcagccctacttgcatttagaggtgagaaagatatgggctgaggggttgtttttcatcgtattgtagatggaaagcacactgcccttggggccatccaaatgtggaccttgatgtagcaccccaccttctggatggccatccttctgaaagtcactgaatttctcagactttattctctttatccataaagaaggagaataataataatccccccaccctgcccaaccactgactggttgggaagctcagaagaaatactgggcacggcatcccattgtaatctatagagtgagtcgcttcttaatattaaatggctgaacacagaagatgtgcaaaaagtactgtgtccccttcctcctccaactgaacatttcatgccctttgcaccctcattttgtctaggagctgccttatgaagggaataggtacctgctccgagctggaggaatctttgccacttatggtggggtatggactgagacagagatggcatgtgacatgcgcactgagtctcaactccatgcaggctctggagcactctcaaattggagtactaatgccttttaaattctcacactagcaatcctttgacctactgatctagggatctagggaaagaatcgtgatcttaacttcaaagggaaggacaaaatgttctgcctcctgttaaaactccatacactaagtgcagagactggatgccttattaaccttgggtagatgcccaaatgttcaaaaggtcaaactcttctgttccccagatcgccagagtcattaaccagtcacactattaaatgaatgaacagatgctgaaaaggtacttgcattactgagatttcttatggtgatggcccctgcctgatatgtattcagcattttgtagttttcaatgtgcattagagtatagtggtgatgacattggcctctgagtttgccacttcttatatctgtgactttggtcaaattgcttaatctctctgagtctcggtttcctggagataataatagcttcttcttcccagggttatcatgaggattacaggagataatgccccaaaaatgcttagtaaagtgcctagcacctagtcaatgctgaattaaaggtggttattcttacttttcgttcatttgaactttgttctcagggagggcaaaggatagacaaagccccatagctagtgaggagtagctgcaagactagaacccaggtgttctgagccctagtcttaggccaagaacaactgttacgtgagatgcacgttttccttcaagggagctcacaattatttccatgtaaattcaaggactgctaaaagagaactctcctctgggactgatatcattttatttcaagattgatttgaaacatgttttttgtttgtttgtttgttttctaggaaagaacaagagaaccagttaagctgaatgcctgaagcaaatccctgttagcgatgttttcaggatgagggagagtggtgcaagaaacgtgcttccagatgcacatggtttcctgggactagggttcagggtgtcatccctgggtgttattaagtgtcagaaggagagcaaacaagggaaacatctgagatccagctaaggctacaccctggaaatgcaagcccagctcttgcaaaggacctcctttggccactcaccttccaggccttacaataacttgtttggactgcaggtttcttggtggactcacaggccattctgcttttatttggtcaacctcagttcacaagcacccagatgctgagatcctcagcatgtgcagcagagtttcatattagcactgggtacctttctgaggctacagggataccgtacagcagcacctgtcacgtccagccaaaggagtgggctctctcaatgtcatccaatgctgtttcaactgtgaagaagaccatctgagagagttgcttttggaggctgaggcaaatttttaaaattctttgttctcctcaactggggtgaattcttggtcttctaggacagcttgaagttttagaaagagtcaagccactcagaaccaacagagaactctttcagagaacaaggtgtggcatagaggaggcagagggctgatcttgatcaaatccaaagtgtgactctaaagcaatgaatgtgaatttttggcaaagcttacaaagggctctaaaggccatctgcaaagagaagccaagcctgatcgatgaatcactagtgcggccggatatcgatcggcacgctgttgattttctcatagtaaggaacagtgggccctttcagtcccacttctgtagtctgtggtactacaaatggtgagcccatgatgttgccattcatagggttattctccagcagtaatgactggccagccactcccatagccgcggggctaggatttattgtcaatggagggacctgcagttctgcacaagcagtactaggatgagcacctgggcccattgcaagggtgacatcttcaaggcaaggcctcttaattttattagggtagcccccatcagccatgtctggaaactggaagtggtcttcttcttgtctcctcttaacagttccctgtgaatggaagagaagagaggaggagaagagaggagaggagaagggaagagaggtgacacacacacacacacacacacacacacacacagagagagagagagagagacagagagaaagagagagagagagagagaggaatttttataaaggtttggcacattaaagctaatgaacaggaaatgtgcatgataaaacagacctctcagtttaaagacttatagttgtgaaaactataaaatacagcctgtctttggaaccatagtgcttatttattcattattatgtttcatctaaactgtctaattacatttcaaataaggcattatgttgtctgtatactaaaacgggatagaacgttattcaaagggtaatctgcccacttcaaggagagttcaacaaaactatgcagaagtcactaaatgaaccatgctgccaaaggcaggcattggagagaaaactagaagtagctaaatagttttaattctttcctgtctacagacacatagattttaacgaaggaataccatagtatagaattgaacttttaggctgccttctagtcttggttaaatgcatcaggctgcagtggtaaaattgaatacaacagagcccttacaggaaagaagtagatctggatgtgttttcttggggagctgtttaaaatactgtttttgggaaagcacaagtttcagaacagtcattgtaggcatcgtattcattgttccatttatttttacacacacacacacacacacacacacacacactctcacacattgctatgtgtacacaaaaataatttggaagaacctatacccaacaatttggagtggtcatttatttgggatgactggcaattccctttctattctcttcatttctgcttgtttgtctttaacgagaacgactcataatccaaaaatttaaaaaagtataaagttatctaaataagaaattttcctctgaagatgcatcctcaggttggggagatattaaacaatgagaaaaggccccaatctgggatctgaaccttgggggagctgcccatcatttatagaagcacagcctttgggaacaaagcaaagtcactagcaatgtgagacttcctactcttcatggcttcatacagtcatccatcgctgttgtgttaatgaccatgacctgtatgttagcaggtaaatgggaaaggaagtgggggcaaaggagtatgtgcaggaatgatcaaaataaggaaaggaagagagggatctggaaatcacctgaatgccgataggtgaacaggtagaattcttttaaagcttcccccacccggtaccccccaaataacccctttccagctttggaagtttcactaggacatacagtgctcatcctctgatgtcaccttaagtttggctcttctggtttgatgagcttgtagcccactaggagctcaaggcatgcatggggccacttgccagcacgatgaggggcatgactgtcatggccaagtgaacatcaaagcagatccccagggctgtatgtctcaggccttggtgcacatcagaatcacttagaaacatccacattcctgggccctcccaccacaaactgacagcttcatccagggtgtggcccaggcatcgggagtttttccaacagctccatggctgattctcaacagaaaaccactggcccagagcaagggtggaggcagcgtggcatagggctctgaccttggccttgccactgaacctctcagagccccagtttctttatgtgtaaaatgagtgtaattatagttcttttctcatgaaggtgctctgactattaagtgaaacggggcacattgtatgacacctaatagctcctcactaactggtacccggcattataaagggcaggtatggaagggttctgggagtccaatacccttcttaaagacagagaggtctctgagacccagagaggggcaggccttacccagagttgctcagccagagggcaacaaggcccaggtcagatgcagggcccctccaccaccactcagctgcctccagacccactgccttcgccatgttgttggtaggacactgcatcgcccccacagaaggggcttgccaacttgagtgagaggacttgcacacttctttgacttttcttttgagatgcccacaatctgaacaagggcacttcaagggacagctctgtcaccaaactcatctgaggcctgaataccatgggtcaggcaggaatgggttggagaggtgtagagcaggcacaataagagggctgaggcccatgcagtcatcagtgcccactttcccaggagtctgactgggcacagcacccatagtgtccctgagctggtccatggagcagctcactaactgtttggcccacagcaggtgctcagtaaatggcagttgaacgaatcaatggacaaaggaacataaattacccaacacacagggagctcagccatttactcaatccattatggagtaacctacaaacaagccactgggtcccaaactgaaattgtgtctcttctacattctcccaaagaatccaataggttaaaaatagaaatgtatgaaatagatcaatcagggatgattgcatgtggatttgacataaggatcccctgcagggagtctgagctggcaacagtcaggcccaaagtgctgtccatgatgtctcgaactgcaagacagttttaacaatggcgaagcaatgcagaaccaggcaggccaaggagggggtgggggttggggaaaggaagggagggaaggggctgtgaggggcaatggtctggcatccctgccacgtgagcctctgaaatttgctggcagcttctatgggctcccagagctttcacttaattgttggtctgccactaacctgctgggagtaaggtgcagggatggaggaggcagggcatgaccaccagacactaaaggtaccagctggggccactggcaaagggaaggaggctgcacctctcctacatgagagcccgtatacacacaccttttccagcactcatcaactgcatcccaagcaaatggtccctgatcaattccaattctagaaaccaactgactactcaataacaaagtagatcccagcaggccgccactgctggagcggatgccacttttgctatgccaagtctgtggctggacagctgctggcatgtacactcactgactttcataaggatgcctaataaagggggcaggctcacctggcttttctcaggggtggggtttggggtgccgatagaggctgctgttttggcagagtggcaagctgcaagcctcttctgagctttcatttttcaatggacttcagtgagaattcactttgtcagaggccatgcagctccatgttttggatttcatggaatgagctttcaacagtgagcctgaagtgccctggctgaacagcaagaacaccagccaaccctaaacaaggccgaggagaggcggctgtgtttacacggaaggctcagccttgctgtaatagcgtctgccttcaccagacatcagtgaggcgtggaaatctattatccagttaattttgcccctagataaagacttgctttcgtgtcttctctttcacagtcccatgatctgttactcatctcaactgcgagaagttggctgggctttcccctgtgcccagtgccacactcgtgccttcactgggtcacctgtgcctgtggctgatgccgctgaggttttgcctgcccagactgggtgtttctgactaaatcccacagccaccattttagatcaagggcaggagatagctcactgctccggaatgacctcccctcccagaatcctggtaggggcggaaggtccccaaccaagctcccagccctttctaaatgaatctccctgcttcacccatgtgcttttctccagtctctgcggtcttgatgacagcagggtattagtcctagctgtcccacagctcctacttctttcaggcctctccctgtgacaatcagtagccactggcaggatttcctcagagcatatctcgatttgctttcagacaattagttaaaaggacactggaccccagacgtcccaactcccagccagagccctcacaggcccggcctttggtggtgaggaagggggagggagtgagtgacagtgccctggcatcttttagaaacgaattcctttctctccatacataaatgcctgcagagtcccatttcagaatccggcagacaaagccaccaatgtgatccccatgaccttataaacattcattaaaatgcatttcaaggcatgtgatggcctccccaccccctagataatgagaaaacaaaggtttctcttctgatagagacaagttcagctctgaagtcaacattatttctggttctgtctgaacaatgacatatggcaactcttccctttctatagttctagtccagaatgacaaaaaaggggaaaaatttcttagagaaggtagagattatacgaatacagtccatgaaatgagcataaggagaataaagaatataacttatccaaagaagtctggcaggctgttataaatgcttgattttggacactgtagttggaggtttaacatggacaccaataaaaaggtcagcaaagggtatgcactgttcctattgggcaagaagataggaggtcaaaggtaaccaggaaagataaactcagggagacttattttccctccagagggcactgggcttgtaggccctgggcaaaattgtcaaaaaggtgaaaatcgcctgtggtttatttagtctgctctttcttcactagtgcctcaccagttcagttcaggccaatttgctagaaggtagcgaacgatcgaccggtgaagttcctatactttctagagaataggaacttcggaataggaacttctacctagatgcatgctcagagcggcccctagctagcgtttaaaacctacagttgaagtcggaagtttacatacacttaagttggagtcattaaaactcgtttttcaactactccacaaatttcttgttaacaaacaatagttttggcaagtcagttaggacatctactttgtgcatgacacaagtcatttttccaacaattgtttacagacagattatttcacttataattcactgtatcacaattccagtgggtcagaagtgtacatacacgcgcttgactgtgcctttaagcttttaattaagagtaattcatacaaaaggactcgcccctgccttggggaatcccagggaccgtcgttaaactcccactaacgtagaacccagagatcgctgcgttcccgccccctcacccgcccgctctcgtcatcactgaggtggagaagagcatgcgtgaggctccggtgcccgtcagtgggcagagcgcacatcgcccacagtccccgagaagttggggggaggggtcggcaattgaaccggtgcctagagaaggtggcgcggggtaaactgggaaagtgatgtcgtgtactggctccgcctttttcccgagggtgggggagaaccgtatataagtgcagtagtcgccgtgaacgttctttttcgcaacgggtttgccgccagaacacaggtaagtgccgtgtgtggttcccgcgggcctggcctctttacgggttatggcccttgcgtgccttgaattacttccacgcccctggctgcagtacgtgattcttgatcccgagcttcgggttggaagtgggtgggagagttcgaggccttgcgcttaaggagccccttcgcctcgtgcttgagttgaggcctggcctgggcgctggggccgccgcgtgcgaatctggtggcaccttcgcgcctgtctcgctgctttcgataagtctctagccatttaaaatttttgatgacctgctgcgacgctttttttctggcaagatagtcttgtaaatgcgggccaagatctgcacactggtatttcggtttttggggccgcgggcggcgacggggcccgtgcgtcccagcgcacatgttcggcgaggcggggcctgcgagcgcggccaccgagaatcggacgggggtagtctcaagctcgccggcctgctctggtgcctggcctcgcgccgccgtgtatcgccccgccctgggcggcaaggctggcccggtcggcaccagttgcgtgagcggaaagatggccgcttcccggccctgctgcagggagctcaaaatggaggacgcggcgctcgggagagcgggcgggtgagtcacccacacaaaggaaaagggcctttccgtcctcagccgtcgcttcatgtgactccacggagtaccgggcgccgtccaggcacctcgattagttctcgagcttttggagtacgtcgtctttaggttggggggaggggttttatgcgatggagtttccccacactgagtgggtggagactgaagttaggccagcttggcacttgatgtaattctccttggaatttgccctttttgagtttggatcttggttcattctcaagcctcagacagtggttcaaagtttttttcttccatttcaggtgtcgtgagaattcgatatcccaccatggacaaggattgtgaaatgaaacgcaccacactggacagccctttggggaagctggagctgtctggttgtgagcagggtctgcacgaaataaagctcctgggcaaggggacgtctgcagctgatgccgtggaggtcccagcccccgctgcggttctcggaggtccggagcccctgatgcagtgcacagcctggctgaatgcctatttccaccagcccgaggctatcgaagagttccccgtgccagcgcttcaccatcccgttttccagcaagagtcgttcacgcgtcaggtgttatggaagctgcttaaggttgtgaaattcggagaagtgatttcttaccagcaattggccgccctggccggcaaccccaaagccgcgcgagcagtgggaggcgccatgagaggcaatcctgtcaagatcctcatcccgtgccacagagtggtctgcagcagcggagccgtgggcaactactccggagggctagccgtgaaggaatggcttctggcccatgaaggccaccggttggggaagccaggcttgggagggagctcaggtctggcaggggcctggctcaagggagcgggagctacctcgggctccccgcctgctggccgaaacctcgaggtgaaacagactttgaattttgaccttctcaagttggcgggagacgtggagtccaacccagggcccatggtgagcaagggcgaggagctgttcaccggggtggtgcccatcctggtcgagctggacggcgacgtaaacggccacaagttcagcgtgtccggcgagggcgagggcgatgccacctacggcaagctgaccctgaagttcatctgcaccaccggcaagctgcccgtgccctggcccaccctcgtgaccaccctgacctacggcgtgcagtgcttcagccgctaccccgaccacatgaagcagcacgacttcttcaagtccgccatgcccgaaggctacgtccaggagcgcaccatcttcttcaaggacgacggcaactacaagacccgcgccgaggtgaagttcgagggcgacaccctggtgaaccgcatcgagctgaagggcatcgacttcaaggaggacggcaacatcctggggcacaagctggagtacaactacaacagccacaacgtctatatcatggccgacaagcagaagaacggcatcaaggtgaacttcaagatccgccacaacatcgaggacggcagcgtgcagctcgccgaccactaccagcagaacacccccatcggcgacggccccgtgctgctgcccgacaaccactacctgagcacccagtccgccctgagcaaagaccccaacgagaagcgcgatcacatggtcctgctggagttcgtgaccgccgccgggatcactctcggcatggacgagctgtacaagtaaagcggccgctcttcgagcagatatcataagatacattgatgagtttggacaaaccacaactagaatgcagtgaaaaaaatgctttatttgtgaaatttgtgatgctattgctttatttgtaaccattataagctgcaataaacaagttacgttaacaacaacaattgcattcattttatgtttcaggttcagggggaggtgtgggaggttttttaaagcaagtaaaacctctacaaatgtggtattaattaaagatctttaaacaatttaaaggcaatgctaccaaatactaagcgcgtgtatgtacacttctgacccactgggaatgtgatgaaagaaataaaagctgaaatgaatcattctctctactattattctgatatttcacattcttaaaataaagtggtgatcctaactgaccttaagacagggaatctttactcggattaaatgtcaggaattgtgaaaaagtgagtttaaatgtatttggctaaggtgtatgtaaacttccgacttcaactgtagtttaaaacgggcccgtagtctagggccgccagtgtgatggagttcggcttcaggtacagcacactggcggccgttactaggtagctagagccttcagactctagggaagttcctatactttctagagaataggaacttcggaataggaacttcacccatggcgatcgctagcctctaactcctagaccgtcagaactgctgggcccttcaagacgggctgctcacacccactcatgttaagcctggtgaggcctgtactctgttttcacaggaagaaatcctcacccagtcttccccaaacacattcccaggttgtgtcattagtgggatagagatgattattgtggggagaagagaaacatctggatggatttggtgaggttgatctatagaggaagtaggtgctgcctgaggtagctgtaatagaagctaaaggtcaaaggagagggccctgtcccaatccagatgactccacttctgctggacccaggttcacaagcttaatctacatttcacctaaatttggctaacaagcccaaaatcacacaggcaaagggagaagtggaggcagaaccgaggttggaggccaccagggccaccgggcagagatcatttaagcccaaccttctcacttctccctgggctctgcctctcttaaaggaccttgtggtgtgacctcttgtaggtccctttcacactcggggcctcagtttccccactgtaaagtgaatgggtcccagctttggtaagcttatgcttacctgatgctttcttcctgggctgctcttgtagagaaaagataaatcttcttcctccatccacgagggctcctttccctgggggtgagagtaggctgaggagagccacttgcacacacccttaaagaaagtattacctgcaccagctcagtgagaggcacagatcagactgttacttgaatcaaattatgagcctccccaaatatatctatgacatttaaataggggattacttgaacatagactgtgggatccggtgtggagtgcgggagactagcaaagtgaatcctgagagtagcaggtctgcacctgttggatcgagaaaggcggcctacaattctggtcaaatgagctgtgcttattgacatattctattagagagtactaccaggtcaccagtcaccagaaaggctgccagctctccaaccacctccagggaactatcctgaatggggccttaacaagtctaagagagggttggtttgggtcccaagccaatatttgctctgctttatgtcagtcatatggaacccaaaccaaccctctcctatgtgcctcaccagtcggtgcagggatcccaatttcaagtttggttttttatggtcaaagtccagcatagattaaatgaaggggtgtgatgatggtgttaaaagagaactccagaccagtttaactcttggacacacatcccatctcaccatggtgcttccaaccttccagagatgatgggctcctattttctgatgacaaagccctccacaggattgctgcctggccatcagggagtgcctctgtaactgaggctgagatcccactttcagtcctccagctgtggcccatccctgctccgcccaccgggtatggcctgtcctaggctcttaggtatggctgcattgtgaaatgatggctacagagctggcatctcctgtagtctggttcatctagtgcactacctcatagttaaaagaaatctgtttaagccactgagggtggctcctagtgccaactccaagaacaggaagcttcccttttttgggaggaggggcagatggtaacatggatcgtccaggtcaatgggagcagggcaaccacagtaagtactggacaacaacacaaaactccatgtgtggcttccatcgagtccctctccaattggtttggtcttctccgtcccatgcagcactttagcaaggggcctggctgaaggctatgaattgtgtggagcctcctcattgcagtctccaaccatctgatgctgggaaaatgtcaccaggatgcagccatgccgtgtggccaatgaaccgagaaaacaccccttttctagaatgctctaaagaggcagaataatccagaggtgaggaaggaaatactccaccagagacccaggcagttcctacaaaagccagactttccttcacctagggagtgacaagaccagtggaaaacactctcaagcagtaacccccaaatgctctgcaagccagtggcgtccagataccgcacaagcgagtgggctgtctaatcccatcatcatgatgtaaatatctctaggctgccctgggctgtgcctgaccctgtcttcagctttccacacctccacctacagcccatgcacagaaggaccacccaggaatgctgcaagtgtggcacctccagggccacccagggagaaggagggcagctatgctggtggctccaggcccatttggcgggtggtaccttcacaccacaaagcccaaactgaggccccagatttggctgatgagggcatattggacaggggtcacttatgctcttccccattgccacctggcctctggctacctggacttggctacctgtggatcctctcacaggtgccaccatcttggctgagtctccagatgcgaggtccctgaggcagtggcgggcttctcgctaatgctgatgggattaggaatgggataggtggggagggccctggactgggccctgatgagccaagtgggtttttagaggggctactggtacatttcagggacaggacatctggtagagctaagctggggcaataaggagccactgctaatctgagagctagaaacaatcagcttctgggtcattattaattagggtagtttgggctgtgtggaagtcacgtactatatggggtagccacagctctctctacagataatctctaagacttctgattgggactgtgtgaatgcagtagcaatatctcttcttactgccaggccctgccagtcctgcctccacgccctggctggccccccttatgatctgacccatgccaggctgccatagtatgttacttctgcattagcactccttgggacctgcctctccactgtccctcagactttaaagaactatacaaacccaaggggctcttcccaagagaattgatatgacttgaggtgattccatttctggaagtagtcactccattttctgcctcactctttcagtgcttcacagagcaggttcgaacgaaggagccatccaactaaccgtcatgttcgggcaaccgaagaagggagtggcaggatttcctttggagacttctggaattagacagcagtttaatgcaagcatctaaattctctccctcccagagtctcattaaaactacagtaagagtttgtgttttgttttgtttttaaagacaaaatcccaccaggatagagagaataggagaggagataacagcatcataatttatgaaactaaaatgcagatagaccaggattaactgactacacagcaccaaggaagctgaatcacaagacagcagaggagaaaactggaaaggatcgtggtctatacggcagaatcttcccaagcctcaggaggaggagctctagatgttcccagatctgggaggtaaagtggaatggggggacatggtcagcgtaatggggttgggctggaagcaggttaaggagcaggcagatctctgaatcccctctctgactctgtgtccccaggcatctgcctgtcccccaccctggaagaggtctggcttgaccctttgtctggtgaatttcctgctctgctttcctggtcctgctggccggatcagtggaggccactcacttcaccccacagggatgttctgtgttgccctacacctgggaactggaggtactggaggcaggctgtggtgagcttgaaagcaaaacacagagggcagtccaatctctttggccatatttcttctgcatatccaataccatgtccacaactctgctagtgtcctgatggtggtgggctctacacattcccgggaagctgaaggcagataatgaccaggacaggtcaacctctcttcttctgaaagccttcatctactaatggcctgggactcttcccttaaatgcttagattgtgtcttccactaaggttttttgctgttgctgttgtttgtttgtttgtttgtttgtttgtttgtttgttttgagacggaatctcactctgtcgcccaggctggagtgtagtggcacaatctcagctcaccacaaccttcacctcctaggttgaaggggttctcctgcctcagcctcctgtgtagctaggattacaggcacatgccaccatgcctggctaatttttgtatttttggtagagacaggatttcgccatgttggccaggctggtcttgaactcctgacctcaggtgatctgcctaccttggtctcccaaagtgctgggattacaggtgtgagccaccacacccggccaaggtttttgtttgtttgtttgtttgtttgtttgttttgtattgaggcagggtatcactctggtcacccaggctggagtgcagtagtgcaatcacggctcactgaaacctccacctccctggcgggctcaggtgatcctgccacctcagcttcccaggtagctgggactacaggcttgtaccaccactcccagctaatttttgcgtttttagtagagacagggtttccccatgttgcccaggttggtctcaaactctgggctcaagcgatctgcctgcctcagcctcccaaagtgctgggattacaggtgtaagccaccgtacccggccccgccactaaggttttgaaaatgaagcaattacaagtttaagtctattaataagtgatgaagccatgtagaaaagcagaataattatcttggatcaggaaggtcacatgaggatctacttgggggttgtcaatattctatttcttgacctgatcagtgttgacagcaggttttaattttttacttctttttgtttgtttgtttttgagacggagtcttgctctgtctcccaggctggagtgcagtggtatgatctcggctcactgcaacctccgcctcctgggttcaagctgttctcctgcctcagcctccccagtagctgggattacaggcaggcaccaccacgaccagctaatttttgtatttttagtagagactgggtttcaccatcttggccaggctggtctcgaacttctgatctcgtgatccgccctccttggcctcccaaagtgctgggattacaggcttgagccagcgtgcccggcccattttttacttccttattaaactgtacatataggccttgcacacttttctgcatcaatgttatattccacaataaagggaaaaggtatatacacaacttgataccagtaatgtgaaacatatatttctacatagaaaaaaaaatgactgaaatactgcactccaatgtgttcacacagtagttgtttctggattatttatatattaaatgtttatatattgtattatgccatgaggtttgtgttttctctccacttttctgcattttccaagtttactacaaagagcacatattactcttataatcagaaagtcataaaatatatttaaaaagacaaaattgaaactaataaggatcaacacaaaacagatgagccatctgtggaaatccgcacagaatactacctaaagagattggtgacgtgcatgatctcactaggatgagcacaaagcttgccagagcctagggtctatttctagggttggctcttggaagccaggatagttgttatctctgggaagagggaggggcacacaaggggcttctaaaacattctgaatgttctatttctgaacctggttggtgggtacatgactgttggttttattattatatgttttatatactcttccgtatgtatggtgtggattccaaaaaaagatttcctttagagaaaaccagaatcacataagtagaaaatatggtgctatgttgaaggaacaactcaagtttatataaaatcatcatcatttataggcttaaaaagttgctttggaattttggtctaactgacttgtcttttctgcagcaaaccacgctccttctggacgtgctccaggcagaggggattagggtgggttcaaggctgcaagtacctagctcagcacactctcttcaggggacttagagtttgtctggtgttggctctctgagctcttgtcaggaatgccgacccttccgaggttcaggatttgaagcctgccttcccaccccagatttggtccacacagacactcaagtatgtatttcaactacaaatgacctgtactttcctattactcctctctttcatggtaacctttctggtatccttccttccctacatttatgggagggggacatcattctctgctctcctgtcactgaaggctccaccttctgtcttcttctgacccatctggttttcctggggccacctcctctccttaccaccctaacgcttttgtaacttgaggagaaatgagagatcacctagtcaggtcatcattctctgtagatgaagaggcccaatggtttgctcaagaattgccaagcgagttaaagacagagagtatgagagtcagcaagacctacagaaagcatctatctgcactgttttgcagggacttagcctttgtgtgtggactcctggaatgccacccactaagaaacattgtctgacaccaactccccacttggtaggtggggacactgaaactcatggcaggaaagggccttgccccaagccagggcagagtgtcactcatcactctcaattttcagtccagggcaccttgttgtgactatcccaaaggcagccactttccctggtctgaaagacctgaagagagaagagaagagaaggatggaaggcagagtatgcggctttgattcatttcctggtgaaaacagatctatacgagaagcaaatttcacgaaagggaagagaagaaagtgtcccatacgttgctggcctgtttcaaccttgctttgattcttgctgaaaagggtaccgtgtatttctgagttcaacatgcagaccagtgttaggaaagccactgcacctccactttagcctccagggctgtgccctgcaaatggcctgcagccttggtgcctcgctctccagactgcattttggaagatgggacagaggcttatggaagcccacattagaacgggggagcagaatgggtgagatgagggatccttgatagtgaaccagatgaaggaatggtagccaaatgccaggcctcctttgtggcttcaatccaaaggctctggagcccttccagggcagaacatcaggcatgtttacccccactgtcctcaacagtgacagaggtgcaatcttgggcagctggccattttgaaagcaacctccttaatctcaactgggaaggctccctagcaggacccctgtgttgcacacctggaggaagctagactaaccagaagctcagcacggttccatctgggatgcccaggtctgagacgaaaaaggtaactctcttttctgggtcctggcccagttgtgtctctctccacctcattctctgagatgcctgtctccccttttttgtcccatcaggaggcaagagctatcactgggccagactccaccagaagccaagccagcttgttacccagcttctcagggagcaaagaacagccttgtttctatcttatccccactgtcccctgcccctgccccacctcccagccattcagcttctggcttccccagagctgcctgcttctttgtggtcctccattccttgaaaagaccttctagtcattagtgtatataaatggccacttagcccagattacagtgaggtcaacagctggggctctgagaattgtcacacactggcacaggagaggaggctattcttccagagaatttggagggcactcccatccacttacaacaaaaagcccatccactgtgcttggcagtaggtgatctgagaaccaatggaaccaggttaatcctgtggcactgttgagtgaggagagcagtggcgggcactggaaaatatcagagacaaggcaggagacctgaaatctaggcttagctcctcatatacttggcagctgtatgacctcagacaaccagtgttacctctctaagcctcagtttcctcatgcaaaaggagggggaataacaacagagcccactgcttgggggtgttgtgaggacaggatgaaaaaacaaacagaaatccctcagtacaggattcagtgcagtggacagtcttgcaaggtctggttcagccctccacccctaccctcaccagtataaagaactctggcctacaagtcagatgacctgagttttaatctcagctttgccattagccgtgtgaacttgagaaagtccctttcctttttacatctattgggatgatcatgcattttttgtcctttattctgttaatatagtgtgttacattgattgcttttcatagactgaaccagccttgtattccagggataaatctcacttggtcatggtgtataatcctttatacaaatgttgctgggttgagtttgctagtattttgttgaagatttttatgtcttgattcataaggaatattggtgtaccttccccttttatggccacagtttccctacaatgatgtagtcgaactagacaacctccaatatctttcagtattcatgtcctctgattctgtgaaactaagaaaattaagaaatagtgattcataggcacaaggcaggcaaaacttagactccttgtagaataattaggaagccaaatattcagtgtgcttatttctcaaataaccttagtttctccagtctgccccaactccgaggcctgaatatctctagatgcttatgatggcaactaaagcctaaaagctaattcattttaaagttcttccaaatgcatagggttttatttttccagacctgggttcagatggggaatttgacaaacaatggaaagggggaaaaacaacaatctaaacactgagtgacaaagtaacaaagaaatagtctagctatcagccagtcaagccagccttggctttgctatccaaagtagtcagtctaattctaccaccagtttctgttcctgtagctgtctactgcctgccagggactctgccttcccacccacaactaccaatggaaggatgtggtgaccataccagtggctgctgacatctcctgccatgggaagcataattgcctccagcagcctcccccttagatccatcatttttgttgcacttggcctgggctgtactcccggccaatgactgaacatggtgagcatagtaatgcaggcccatttctgtgaggagcaggactcctccagtaggtgactttggctcaaggactctctattggcctggttgaacttttcctgaactgtgctactgtctgagactcttcttacccaatcctctttctcgccccaattgtcacagaccacctgcattgtggtctgagtctctccccaccttctcttgctcttccctgtttatctttcacaggcatttcccccagtacattccttgaatgtctaacccgatacgggtgcctgacttttggcagacctaagcagacaaaaaggagtacttggttacctagctcttctttctaccacaaacatcgagggaaccctttttccctcacccctctgccacacccccactgccccagtgaacaaccacagagagagctgtggtataatattaggctggtgcaaaagtaattgcggtttttgccattacttttaatggtaaaaaccgcaattacttttgcacctacctagtatttgtgtccccccaaattcatatgttgaaacctaacccacaatatgatgtcattaggaggcaagaccttgaggaggtgattagatgatggggtggagctctcctgaatgagattagtgcccttataagaagaagcccaaggaagctaccttgactcttccatcacatgagaatgcagcaagaaggcaccatctactaatcaggaagagagctctcaccagacactgaatctgccagtgtcttgatcttgaagttcccagcctccagaactatgcataatgcatttccattgtctctaagccacccagcctatggtattttgtcatagcagcctgaactgactaagacagtgagccacatgagaagtgccccaacccctcccttaagcacttggctcacagatcagtgggttcatttctgcctgagttttattgttattctgtagatttcttgggctagatatatttttctgttattttccttcttcacctcagtcatgaattggttgttttaaaaaagacaatgtaagtcatggggaaactcctgacaactctactctcctagggttcctgataaaaggggattcagttgagtcctctgatggtctctacctgccaaagtccagcagcccttagcaaacatgctgctcgtttctgtagagaaggtgctggtgtcccaccatacttctctctccctcatgaagggcttgcgacccagcaaatgggtggcttatatgggtctgtttcaaaggaagagccagctctgggaagaaaaacgatgagcataagcataacctaccactgtgcctgggaaagcagacaacttttttgatgtgtgaatatctaatgagaatggaatccatcaattaccttaaacttaggcacagtcttcaaattcaatatatgtgggatatacttttagtcagtttgtagacgttatttgtaataaataatctggcttctctaaagaaattattttaagtgtttggtttggtttgatttaatggtaaaattatatttagtggcagagaattatagcaatggtgataaactatagagtgtcataagttcatatcttattctcacatttgaagctgcctgcagatgcattcaagatgcagccagaagtcaggagactcaggctgttatttggagctcatcattttacagccttgctggactcccactttctcaggggaaaaatgtggtgttgacccagattagctctccaggccctgctgagttgggcactctgtaagctggagggtcttctattgtcttcacctaagtgtcaatcaacaacccaaatgggcatgggggaagagggagctgggccaatgcccagggtgcctggtagagagataccttgggcactggaaggcaccagcttcccagagagaagggggagggccatgaaaaagttggctgtagatgccagggacactgggactctccagctgtgtgtttgtgtcttctgaagacttatgtttcattcctttggagcatgcataatcatacactgtgggatgtgttatatagattgcttgatagttcaccactgtaataaaatactgtgactggaatctgctcccagtctgcctttgatagcacttgtgcaacacacatttactgagcatttacagtgatccaggacctgtgttgtgaaaacattgatggacaaggcagatggtggagcacgtcagtgaggatttttaacaaaggctggtaagtgctataaaggaacattgtaggacactagagaacaaagaacaggagaacctgacttaggctggggtggggcgttggttagaggaggctccttggaggacatgaggtttaagctgtgacctgaggatgaatagatgttggccaggtgaggtaccggtatttgtcagccttaccagtaaaaaagaaaacctattaaaaaaaaaatacacatacaaagcctcatcagccatggcttaccagagaaagtacagcgggcacacaaaccacaagctctaaagtcactctccaacctctccacaatatatatacacaagccctaaactgacgtaatgggactaaagtgtaaaaaatcccgccaaacccaacacacaccccgaaactgcgtcaccagggaaaagtacagtttcacttccgcaatcccaacaagcgtcacttcctctttctcacggtacgtcacatcccattaacttacaacgtcattttcccacggccgcgccgccccttttaaccgttaaccccacagccaatcaccacacggcccacactttttaaaatcacctcatttacatattggcaccattccatctataaggtatattattgatgatg

SEQ ID NO: 191 - DNA, 29986 bp, Artificial Sequence
  HDAd35-T4-Ef1a-mgmt-mCherry
  misc_feature (1)..(481): Ad35 5'end
  misc_feature (14126)..(14159): FRT (Complementary)
  misc_feature (14220)..(14463): pT4 LIR
  misc_feature (14478)..(15812): Ef1a promoter
  misc_feature (15830)..(16450): mgmt
  misc_feature (16451)..(16522): 2A
  misc_feature (16526)..(17230): mCherry
  misc_feature (17259)..(17380): SV40pA
  misc_feature (17491)..(17756): pT4 RIR
  misc_feature (17863)..(17896): FRT (Complementary)
  misc_feature (29579)..(29986): Ad35 3'end
catcatcaataatataccttatagatggaatggtgccaatatgtaaatgaggtgattttaaaaagtgtgggccgtgtggtgattggctgtggggttaacggttaaaaggggcggcgcggccgtgggaaaatgacgttttatgggggtggagtttttttgcaagttgtcgcgggaaatgttacgcataaaaaggcttcttttctcacggaactacttagttttcccacggtatttaacaggaaatgaggtagttttgaccggatgcaagtgaaaattgctgattttcgcgcgaaaactgaatgaggaagtgtttttctgaataatgtggtatttatggcagggtggagtatttgttcagggccaggtagactttgacccattacgtggaggtttcgattaccgtgttttttacctgaatttccgcgtaccgtgtcaaagtcttctgtttttacgtaggtgtcagctgatcgctagggtatttaccggtattcaaggattacatgagcttagaaatgtaattagcatagtgtgtggcatagtgtagataccaaataaatatgatctctccttctactcttgaaaatgcaaacacattcttggtggtcctaaaatagcctgtaacatggtttactcagcagcatttgctattcaaggcagatctgcctttagtcattggctgcgctcctgaacagctgtgtgaaaggctaacttttgtaaaccaaatcaaaataaaatgcagcaaaaatttgtcactgaaaggaaatcctcagtatatccttttatgaaatgaaagatccctcatccaaacttaacttttttaaaagtgcgcatttggagatatagccctttcttatgaatcctaattcaattttggccataaacacacgttgatgttccccaccccaaagcacatagcaacaagagtaggttctatattgaaaataatgacaatttaaaaacatgtacttatttcactgtatgtggacagtgtctatgattgcatcatgaagtgtcatataaccatgtacgtgtacatgagagagagatagagagagaagtggtagggtggtggtggtagaggggatggcgatagtaatcatggtaatggtagaggtgatggaggtggtaatgacggaggtaagggtggtagtgatgatggtggtggtggtaatggtggtggatgtggtggtggcaattgggatggtgggatggtggtagccatggtgatggtggtaatggtgttgatttaaagggtggtggtagtgaaggtgagggtagtggtggtggaggtggtggtgctggtagcaatagtgatggtggtgatggtgttgatgagggtgttgggatcagggtgagttcccacagtatatttcattcttgttgtaccactctgtcaacagcaccactgactgggacagaggaagaaggcacactctgaatgtgttattaacagaaacctcaaaacagtctgtctccttgtagtcattcaaaattatctttttcttacctggaaaactgaaactgaattaccgggaaaaacacaggagatttttgtttgttaatatgctgccaataaagtaattttatgtcaaatttaactacaggaaagggcaaggcattttctaagttccttagatgtcatgtggctaaaaaaaacaaaaggatggacagcagttagatactgtacacttagctgtttgaagccatatattcagaaagcagatgttgggagttggtgtttgaggactgatttcctggaggtattttatataggccaagttcattgttctaaactctaagggcttgacttgagggaggaaaagaggcaagaacatgtttagttttgctgacagcatcacatgggcagccctaaggctagacaactttagggcctgaagcttattctaggaaagaagcacctacagagtggcactgggctcccctccactatagagatgaagtcatatgacagtaaagggcaggcagggctgcctagggggcccagaactgacacttccattagaatgagcacaggccagggagagaagtggggaaccagagagaaggagctggaattctagtaggacaaacggtaagtgaacaacaagaacaagttaagagtgtgtgcagtattctttcaaagactgaaaaaatagtgatgtgatagaatggcaggtggctctgagcaggccaggagaaggactgggggcagagcatcccaggcaggagggcagcaagtgggaaggccctggggtggggcttttggactgttccagtgacgggcaggcagccagtgtgcctgtcacacaatgcaccagggaagtagtcgtgaatttgcagagggtcttgcaggctatgggaaagggattggattgtattttgtttgtagggaagccatcgggggacttaagcagaggaaggattggcttcatctctttgaaaaagttctctctggatgctgatgggaggagaaatggaaggaaaagaaacacttttaggggcaagaacttttgagaagggtggaattgggagtgtggagttggggccagctttggcacaggaggggaagctaaacacgtggccgcatgagggcctgtaattctacctgaaatgggtaccatttgttagggtaaacaaatgaaccaaatgcccagtgatacagaccaagtgttggcaaacttcttctgtgatggcccaggtagtaaatgtctcaggcttcgcaggccatgtggtctctgttgaagctctgtgtagtagacaatatgttaatgactgggcgtgactgtgtgctaataaaagtttatttacaaaaacagcccgtgggctggatttagctcacaggctgtagtttgccaacctctgacctagagcatgaactgagcatcttcttggagggaaataagttctttccaagttgccctcctcacattgcagggggccatgtaggcccattattcacagaagagtgggtgggcaacctttctggagcagaaaaacgtaaagatttcttccgtagtgcaagtaaggtgaccatttctaaaccgtgcaagtgatccagcagtcccaaaagttgtttcacttctcattgtgcgcccgttctcaggtgctccgaagcttccagtcctttgtagggacatggatgaaattggaaatcatcattctcagtaaactatcgcaagaacaaaaaaccaaacaccgcatattctcactcataggtgggaattgaacaatgagatcacatggacacgggaaggggaacatcacattctggggactgttgtggggtggggggaggggggagggatagcattgggagatatacctaatgctagatgacaagttagtgggtgcagcgcaccagtgtggcacatgtatacatatgtaactaacctgcacaatgtgcacatgtaccctaaaacttaaagtataataataaaagaaaaaaaaaaagagaggagagaaacatcatcccctccaggatacccttgggccttgttcttatagtcttgtacattgttgaacaatttgcatgggctagtggattaaagcacaccctccaccctcaggccctcaagggtctctatgataatacagtctcaccttctaccctttccatcaccatcctaggtgctatggccaaccttgaggctgccatgttaggtctatgcatttcccacctccaccacataactctctgaaggccaggtagtttcctattcatcttggtaaccccaaagcctcgtgacagggctcagctggcatctgcggatgtgaatgaaccattggagaaaatggtactctgcaaataactctgttattttcccatttcctgtgtaaggcctagagacaatgactttttaattgcaccccttcccctctgtatgacactggccttctcttgtgtccagcaatgtgggtggcctagatgatttctaagggacttctggccaagatgaacagcagctgcatcttactgagcatttactatgtgccatatactcagccacagctctaggggcatagaagcaggagctctcagggtcagggcagtgagtgagcaagcgagcacctatgccagccctgcctctggatggggacttgagagggtgatggaagcctgcagcactggagggaggcagacaaagacaggcctgtgctgagggggcccggagcaagagagagggaggcaatgacagcagagacatgcctgcgccttgggtttgagtgcccagtggtcaaatccacttccctgtggctgatgcttgcctttctaactttggaatttaggggttggagatctggtgagaaggtaggagggagatgaggaggagaagggaaaggcaggaaggaaggggagggaaaggaaaagcaaaaggggaggaggaaggtttccaacaaattattctatatcaactgcggaaatcaaaatttgttgcccaaatcttagaagctcatgtccctcctccccagaagtctggaatgcagcactccaggggtagcttataacccaaatatctatctgtaaaaagagaaacattgggctttcgagctgtggattctcagtaaaagcaagaggcctcagcctacacaggccagcccagagtttgaggaaccccaggcccacacccacagggctggcccctgggtctgcatactccctagaaatgtgcacacttctgagcctcaactctgtcctggagtctaacagcatccctctccttcctggggcagttccacctccagaaacctgttaccttgggccttatgtcaaggaaactgtgggaaagagctaggcaggaatgcagatgaggccagcatgggctcctaaaagtttagaaataggcagtgtcatgctcccaggtgcctgcataaaccagctgaaaaatggagctcccctcaccagcactctcccttcaaacagactgtgatttgcaggtcactggtttaccaagccaggctacccaggcaggacccagatgccaagcccagtggtgtcctgcaagctgagcagtgctcagttcttgcaaaaaaaggtctgtgtgaaggcaaggcctctgcctggcttctcaccccagttgggtgtctggaacaggaaggagcccttactgcagaaaaaggaggagggagcaaagggagcgaacagctgcgtgctccatggggaggatccccaaagtagaaaggcgcatacacactgcagcccttgacccagaatgctcacagctacattacagattcaggtctcctcagtgtagtggggctgctgatgagactgtggcatcctcaggggtcaggacacacattttccatcactcttctgatggcaaaaaacctctgagccaatgccaacctctgatcattaaaaaaaagtgctcacagcagtgtgtggtttaggatcatgccctgtgtggtttggaacacgtgcacaaccacaccttgttcatcaccatcccagaaaccctgacgcaggcaaagagcagagttattaaccctactttactgatgtggatactgaggcccagaggctcatgcaagttatcaataagtggcagggacagttgcctctagattaactagcccctaggatcacctgggtcttggaaggggacccataaacatgagctcccctctcttggggccagatttgcacctgtgccgcgccttcagcctgcatgaagtaggggctgctggcaaagactcaaagctgtaaatctgggttttctcttgaggcttctaagggagctgtttcgacaactcactctgttcccagctggctgcccctgcatagggttttaaagcagcctagctttctgccaggcttggcagtggacaacgctggtcagaacatcccagagagctaccagaatgaagtaagtttgcttctactctttacctgtttatgggctgtctctgccactggaatgaaaggcactgagaacagtgcctggcctgcagaaggccctggaaatacctgagctcctaatctgggaataggagtaggaagagctttggaggcagggcacctgagtttgagatctacaacttcctgcctgtgtgacattgggaaagtctccatcctttctgagcctcagtctccaccctggggaagtggaaatatcaatctctgtgacacagaagcaaatgagcgaatgtgcacaaagtaccttgcacaagagagacgctcaaacacttgcctccaggtttcaccgagaactacagagtaagatagatttgttcccagtggaggaagcctgggaataatttgcccctagactatgaattcctggggctcaagatcgagcacagggccaggcacacagaagggaccctggaaatgtggcaggaggccagagatagacaggcccttagagctcatacccatgccctctgacctcaagaagaaagaaacctgctcaaaatctcacaaagagcttgttccaaccctgaatcgagtctgaggactccttcctgagtccagcactttttctgcaagaagtatatgcctccaaagctgatgggcgcaaatcttgaaccccgtcacataaacacaaagggaggaggtgactagagctcctcctactggatatgtctaaggtcaccagtctaaagaaaagggatggatagaatgaggccagtatttttgcagccatccaaatgtccacatacgctgttacactgagggctcctctctcccccgtcttcagccctacttgcatttagaggtgagaaagatatgggctgaggggttgtttttcatcgtattgtagatggaaagcacactgcccttggggccatccaaatgtggaccttgatgtagcaccccaccttctggatggccatccttctgaaagtcactgaatttctcagactttattctctttatccataaagaaggagaataataataatccccccaccctgcccaaccactgactggttgggaagctcagaagaaatactgggcacggcatcccattgtaatctatagagtgagtcgcttcttaatattaaatggctgaacacagaagatgtgcaaaaagtactgtgtccccttcctcctccaactgaacatttcatgccctttgcaccctcattttgtctaggagctgccttatgaagggaataggtacctgctccgagctggaggaatctttgccacttatggtggggtatggactgagacagagatggcatgtgacatgcgcactgagtctcaactccatgcaggctctggagcactctcaaattggagtactaatgccttttaaattctcacactagcaatcctttgacctactgatctagggatctagggaaagaatcgtgatcttaacttcaaagggaaggacaaaatgttctgcctcctgttaaaactccatacactaagtgcagagactggatgccttattaaccttgggtagatgcccaaatgttcaaaaggtcaaactcttctgttccccagatcgccagagtcattaaccagtcacactattaaatgaatgaacagatgctgaaaaggtacttgcattactgagatttcttatggtgatggcccctgcctgatatgtattcagcattttgtagttttcaatgtgcattagagtatagtggtgatgacattggcctctgagtttgccacttcttatatctgtgactttggtcaaattgcttaatctctctgagtctcggtttcctggagataataatagcttcttcttcccagggttatcatgaggattacaggagataatgccccaaaaatgcttagtaaagtgcctagcacctagtcaatgctgaattaaaggtggttattcttacttttcgttcatttgaactttgttctcagggagggcaaaggatagacaaagccccatagctagtgaggagtagctgcaagactagaacccaggtgttctgagccctagtcttaggccaagaacaactgttacgtgagatgcacgttttccttcaagggagctcacaattatttccatgtaaattcaaggactgctaaaagagaactctcctctgggactgatatcattttatttcaagattgatttgaaacatgttttttgtttgtttgtttgttttctaggaaagaacaagagaaccagttaagctgaatgcctgaagcaaatccctgttagcgatgttttcaggatgagggagagtggtgcaagaaacgtgcttccagatgcacatggtttcctgggactagggttcagggtgtcatccctgggtgttattaagtgtcagaaggagagcaaacaagggaaacatctgagatccagctaaggctacaccctggaaatgcaagcccagctcttgcaaaggacctcctttggccactcaccttccaggccttacaataacttgtttggactgcaggtttcttggtggactcacaggccattctgcttttatttggtcaacctcagttcacaagcacccagatgctgagatcctcagcatgtgcagcagagtttcatattagcactgggtacctttctgaggctacagggataccgtacagcagcacctgtcacgtccagccaaaggagtgggctctctcaatgtcatccaatgctgtttcaactgtgaagaagaccatctgagagagttgcttttggaggctgaggcaaatttttaaaattctttgttctcctcaactggggtgaattcttggtcttctaggacagcttgaagttttagaaagagtcaagccactcagaaccaacagagaactctttcagagaacaaggtgtggcatagaggaggcagagggctgatcttgatcaaatccaaagtgtgactctaaagcaatgaatgtgaatttttggcaaagcttacaaagggctctaaaggccatctgcaaagagaagccaagcctgatcgatgaatcactagtgcggccggatatcgatcggcacgctgttgattttctcatagtaaggaacagtgggccctttcagtcccacttctgtagtctgtggtactacaaatggtgagcccatgatgttgccattcatagggttattctccagcagtaatgactggccagccactcccatagccgcggggctaggatttattgtcaatggagggacctgcagttctgcacaagcagtactaggatgagcacctgggcccattgcaagggtgacatcttcaaggcaaggcctcttaattttattagggtagcccccatcagccatgtctggaaactggaagtggtcttcttcttgtctcctcttaacagttccctgtgaatggaagagaagagaggaggagaagagaggagaggagaagggaagagaggtgacacacacacacacacacacacacacacacacagagagagagagagagagacagagagaaagagagagagagagagagaggaatttttataaaggtttggcacattaaagctaatgaacaggaaatgtgcatgataaaacagacctctcagtttaaagacttatagttgtgaaaactataaaatacagcctgtctttggaaccatagtgcttatttattcattattatgtttcatctaaactgtctaattacatttcaaataaggcattatgttgtctgtatactaaaacgggatagaacgttattcaaagggtaatctgcccacttcaaggagagttcaacaaaactatgcagaagtcactaaatgaaccatgctgccaaaggcaggcattggagagaaaactagaagtagctaaatagttttaattctttcctgtctacagacacatagattttaacgaaggaataccatagtatagaattgaacttttaggctgccttctagtcttggttaaatgcatcaggctgcagtggtaaaattgaatacaacagagcccttacaggaaagaagtagatctggatgtgttttcttggggagctgtttaaaatactgtttttgggaaagcacaagtttcagaacagtcattgtaggcatcgtattcattgttccatttatttttacacacacacacacacacacacacacacacactctcacacattgctatgtgtacacaaaaataatttggaagaacctatacccaacaatttggagtggtcatttatttgggatgactggcaattccctttctattctcttcatttctgcttgtttgtctttaacgagaacgactcataatccaaaaatttaaaaaagtataaagttatctaaataagaaattttcctctgaagatgcatcctcaggttggggagatattaaacaatgagaaaaggccccaatctgggatctgaaccttgggggagctgcccatcatttatagaagcacagcctttgggaacaaagcaaagtcactagcaatgtgagacttcctactcttcatggcttcatacagtcatccatcgctgttgtgttaatgaccatgacctgtatgttagcaggtaaatgggaaaggaagtgggggcaaaggagtatgtgcaggaatgatcaaaataaggaaaggaagagagggatctggaaatcacctgaatgccgataggtgaacaggtagaattcttttaaagcttcccccacccggtaccccccaaataacccctttccagctttggaagtttcactaggacatacagtgctcatcctctgatgtcaccttaagtttggctcttctggtttgatgagcttgtagcccactaggagctcaaggcatgcatggggccacttgccagcacgatgaggggcatgactgtcatggccaagtgaacatcaaagcagatccccagggctgtatgtctcaggccttggtgcacatcagaatcacttagaaacatccacattcctgggccctcccaccacaaactgacagcttcatccagggtgtggcccaggcatcgggagtttttccaacagctccatggctgattctcaacagaaaaccactggcccagagcaagggtggaggcagcgtggcatagggctctgaccttggccttgccactgaacctctcagagccccagtttctttatgtgtaaaatgagtgtaattatagttcttttctcatgaaggtgctctgactattaagtgaaacggggcacattgtatgacacctaatagctcctcactaactggtacccggcattataaagggcaggtatggaagggttctgggagtccaatacccttcttaaagacagagaggtctctgagacccagagaggggcaggccttacccagagttgctcagccagagggcaacaaggcccaggtcagatgcagggcccctccaccaccactcagctgcctccagacccactgccttcgccatgttgttggtaggacactgcatcgcccccacagaaggggcttgccaacttgagtgagaggacttgcacacttctttgacttttcttttgagatgcccacaatctgaacaagggcacttcaagggacagctctgtcaccaaactcatctgaggcctgaataccatgggtcaggcaggaatgggttggagaggtgtagagcaggcacaataagagggctgaggcccatgcagtcatcagtgcccactttcccaggagtctgactgggcacagcacccatagtgtccctgagctggtccatggagcagctcactaactgtttggcccacagcaggtgctcagtaaatggcagttgaacgaatcaatggacaaaggaacataaattacccaacacacagggagctcagccatttactcaatccattatggagtaacctacaaacaagccactgggtcccaaactgaaattgtgtctcttctacattctcccaaagaatccaataggttaaaaatagaaatgtatgaaatagatcaatcagggatgattgcatgtggatttgacataaggatcccctgcagggagtctgagctggcaacagtcaggcccaaagtgctgtccatgatgtctcgaactgcaagacagttttaacaatggcgaagcaatgcagaaccaggcaggccaaggagggggtgggggttggggaaaggaagggagggaaggggctgtgaggggcaatggtctggcatccctgccacgtgagcctctgaaatttgctggcagcttctatgggctcccagagctttcacttaattgttggtctgccactaacctgctgggagtaaggtgcagggatggaggaggcagggcatgaccaccagacactaaaggtaccagctggggccactggcaaagggaaggaggctgcacctctcctacatgagagcccgtatacacacaccttttccagcactcatcaactgcatcccaagcaaatggtccctgatcaattccaattctagaaaccaactgactactcaataacaaagtagatcccagcaggccgccactgctggagcggatgccacttttgctatgccaagtctgtggctggacagctgctggcatgtacactcactgactttcataaggatgcctaataaagggggcaggctcacctggcttttctcaggggtggggtttggggtgccgatagaggctgctgttttggcagagtggcaagctgcaagcctcttctgagctttcatttttcaatggacttcagtgagaattcactttgtcagaggccatgcagctccatgttttggatttcatggaatgagctttcaacagtgagcctgaagtgccctggctgaacagcaagaacaccagccaaccctaaacaaggccgaggagaggcggctgtgtttacacggaaggctcagccttgctgtaatagcgtctgccttcaccagacatcagtgaggcgtggaaatctattatccagttaattttgcccctagataaagacttgctttcgtgtcttctctttcacagtcccatgatctgttactcatctcaactgcgagaagttggctgggctttcccctgtgcccagtgccacactcgtgccttcactgggtcacctgtgcctgtggctgatgccgctgaggttttgcctgcccagactgggtgtttctgactaaatcccacagccaccattttagatcaagggcaggagatagctcactgctccggaatgacctcccctcccagaatcctggtaggggcggaaggtccccaaccaagctcccagccctttctaaatgaatctccctgcttcacccatgtgcttttctccagtctctgcggtcttgatgacagcagggtattagtcctagctgtcccacagctcctacttctttcaggcctctccctgtgacaatcagtagccactggcaggatttcctcagagcatatctcgatttgctttcagacaattagttaaaaggacactggaccccagacgtcccaactcccagccagagccctcacaggcccggcctttggtggtgaggaagggggagggagtgagtgacagtgccctggcatcttttagaaacgaattcctttctctccatacataaatgcctgcagagtcccatttcagaatccggcagacaaagccaccaatgtgatccccatgaccttataaacattcattaaaatgcatttcaaggcatgtgatggcctccccaccccctagataatgagaaaacaaaggtttctcttctgatagagacaagttcagctctgaagtcaacattatttctggttctgtctgaacaatgacatatggcaactcttccctttctatagttctagtccagaatgacaaaaaaggggaaaaatttcttagagaaggtagagattatacgaatacagtccatgaaatgagcataaggagaataaagaatataacttatccaaagaagtctggcaggctgttataaatgcttgattttggacactgtagttggaggtttaacatggacaccaataaaaaggtcagcaaagggtatgcactgttcctattgggcaagaagataggaggtcaaaggtaaccaggaaagataaactcagggagacttattttccctccagagggcactgggcttgtaggccctgggcaaaattgtcaaaaaggtgaaaatcgcctgtggtttatttagtctgctctttcttcactagtgcctcaccagttcagttcaggccaatttgctagaaggtagcgaacgatcgaccggtgaagttcctatactttctagagaataggaacttcggaataggaacttctacctagatgcatgctcagagcggcccctagctagcgtttaaaacctacagttgaagtcggaagtttacatacacttaagttggagtcattaaaactcgtttttcaactactccacaaatttcttgttaacaaacaatagttttggcaagtcagttaggacatctactttgtgcatgacacaagtcatttttccaacaattgtttacagacagattatttcacttataattcactgtatcacaattccagtgggtcagaagtgtacatacacgcgcttgactgtgcctttaagcttttaattaagagtaattcatacaaaaggactcgcccctgccttggggaatcccagggaccgtcgttaaactcccactaacgtagaacccagagatcgctgcgttcccgccccctcacccgcccgctctcgtcatcactgaggtggagaagagcatgcgtgaggctccggtgcccgtcagtgggcagagcgcacatcgcccacagtccccgagaagttggggggaggggtcggcaattgaaccggtgcctagagaaggtggcgcggggtaaactgggaaagtgatgtcgtgtactggctccgcctttttcccgagggtgggggagaaccgtatataagtgcagtagtcgccgtgaacgttctttttcgcaacgggtttgccgccagaacacaggtaagtgccgtgtgtggttcccgcgggcctggcctctttacgggttatggcccttgcgtgccttgaattacttccacgcccctggctgcagtacgtgattcttgatcccgagcttcgggttggaagtgggtgggagagttcgaggccttgcgcttaaggagccccttcgcctcgtgcttgagttgaggcctggcctgggcgctggggccgccgcgtgcgaatctggtggcaccttcgcgcctgtctcgctgctttcgataagtctctagccatttaaaatttttgatgacctgctgcgacgctttttttctggcaagatagtcttgtaaatgcgggccaagatctgcacactggtatttcggtttttggggccgcgggcggcgacggggcccgtgcgtcccagcgcacatgttcggcgaggcggggcctgcgagcgcggccaccgagaatcggacgggggtagtctcaagctcgccggcctgctctggtgcctggcctcgcgccgccgtgtatcgccccgccctgggcggcaaggctggcccggtcggcaccagttgcgtgagcggaaagatggccgcttcccggccctgctgcagggagctcaaaatggaggacgcggcgctcgggagagcgggcgggtgagtcacccacacaaaggaaaagggcctttccgtcctcagccgtcgcttcatgtgactccacggagtaccgggcgccgtccaggcacctcgattagttctcgagcttttggagtacgtcgtctttaggttggggggaggggttttatgcgatggagtttccccacactgagtgggtggagactgaagttaggccagcttggcacttgatgtaattctccttggaatttgccctttttgagtttggatcttggttcattctcaagcctcagacagtggttcaaagtttttttcttccatttcaggtgtcgtgagaattcgatatcccaccatggacaaggattgtgaaatgaaacgcaccacactggacagccctttggggaagctggagctgtctggttgtgagcagggtctgcacgaaataaagctcctgggcaaggggacgtctgcagctgatgccgtggaggtcccagcccccgctgcggttctcggaggtccggagcccctgatgcagtgcacagcctggctgaatgcctatttccaccagcccgaggctatcgaagagttccccgtgccagcgcttcaccatcccgttttccagcaagagtcgttcacgcgtcaggtgttatggaagctgcttaaggttgtgaaattcggagaagtgatttcttaccagcaattggccgccctggccggcaaccccaaagccgcgcgagcagtgggaggcgccatgagaggcaatcctgtcaagatcctcatcccgtgccacagagtggtctgcagcagcggagccgtgggcaactactccggagggctagccgtgaaggaatggcttctggcccatgaaggccaccggttggggaagccaggcttgggagggagctcaggtctggcaggggcctggctcaagggagcgggagctacctcgggctccccgcctgctggccgaaacctcgaggtgaaacagactttgaattttgaccttctcaagttggcgggagacgtggagtccaacccagggcccatggtgagcaagggcgaggaggataacatggccatcatcaaggagttcatgcgcttcaaggtgcacatggagggctccgtgaacggccacgagttcgagatcgagggcgagggcgagggccgcccctacgagggcacccagaccgccaagctgaaggtgaccaagggtggccccctgcccttcgcctgggacatcctgtcccctcagttcatgtacggctccaaggcctacgtgaagcaccccgccgacatccccgactacttgaagctgtccttccccgagggcttcaagtgggagcgcgtgatgaacttcgaggacggcggcgtggtgaccgtgacccaggactcctccctgcaggacggcgagttcatctacaaggtgaagctgcgcggcaccaacttcccctccgacggccccgtaatgcagaagaagaccatgggctgggaggcctcctccgagcggatgtaccccgaggacggcgccctgaagggcgagatcaagcagaggctgaagctgaaggacggcggccactacgacgctgaggtcaagaccacctacaaggccaagaagcccgtgcagctgcccggcgcctacaacgtcaacatcaagttggacatcacctcccacaacgaggactacaccatcgtggaacagtacgaacgcgccgagggccgccactccaccggcggcatggacgagctgtacaagtaggcggccgctcttcgagcagatatcataagatacattgatgagtttggacaaaccacaactagaatgcagtgaaaaaaatgctttatttgtgaaatttgtgatgctattgctttatttgtaaccattataagctgcaataaacaagttacgttaacaacaacaattgcattcattttatgtttcaggttcagggggaggtgtgggaggttttttaaagcaagtaaaacctctacaaatgtggtattaattaaagatctttaaacaatttaaaggcaatgctaccaaatactaagcgcgtgtatgtacacttctgacccactgggaatgtgatgaaagaaataaaagctgaaatgaatcattctctctactattattctgatatttcacattcttaaaataaagtggtgatcctaactgaccttaagacagggaatctttactcggattaaatgtcaggaattgtgaaaaagtgagtttaaatgtatttggctaaggtgtatgtaaacttccgacttcaactgtagtttaaaacgggcccgtagtctagggccgccagtgtgatggagttcggcttcaggtacagcacactggcggccgttactaggtagctagagccttcagactctagggaagttcctatactttctagagaataggaacttcggaataggaacttcacccatggcgatcgctagcctctaactcctagaccgtcagaactgctgggcccttcaagacgggctgctcacacccactcatgttaagcctggtgaggcctgtactctgttttcacaggaagaaatcctcacccagtcttccccaaacacattcccaggttgtgtcattagtgggatagagatgattattgtggggagaagagaaacatctggatggatttggtgaggttgatctatagaggaagtaggtgctgcctgaggtagctgtaatagaagctaaaggtcaaaggagagggccctgtcccaatccagatgactccacttctgctggacccaggttcacaagcttaatctacatttcacctaaatttggctaacaagcccaaaatcacacaggcaaagggagaagtggaggcagaaccgaggttggaggccaccagggccaccgggcagagatcatttaagcccaaccttctcacttctccctgggctctgcctctcttaaaggaccttgtggtgtgacctcttgtaggtccctttcacactcggggcctcagtttccccactgtaaagtgaatgggtcccagctttggtaagcttatgcttacctgatgctttcttcctgggctgctcttgtagagaaaagataaatcttcttcctccatccacgagggctcctttccctgggggtgagagtaggctgaggagagccacttgcacacacccttaaagaaagtattacctgcaccagctcagtgagaggcacagatcagactgttacttgaatcaaattatgagcctccccaaatatatctatgacatttaaataggggattacttgaacatagactgtgggatccggtgtggagtgcgggagactagcaaagtgaatcctgagagtagcaggtctgcacctgttggatcgagaaaggcggcctacaattctggtcaaatgagctgtgcttattgacatattctattagagagtactaccaggtcaccagtcaccagaaaggctgccagctctccaaccacctccagggaactatcctgaatggggccttaacaagtctaagagagggttggtttgggtcccaagccaatatttgctctgctttatgtcagtcatatggaacccaaaccaaccctctcctatgtgcctcaccagtcggtgcagggatcccaatttcaagtttggttttttatggtcaaagtccagcatagattaaatgaaggggtgtgatgatggtgttaaaagagaactccagaccagtttaactcttggacacacatcccatctcaccatggtgcttccaaccttccagagatgatgggctcctattttctgatgacaaagccctccacaggattgctgcctggccatcagggagtgcctctgtaactgaggctgagatcccactttcagtcctccagctgtggcccatccctgctccgcccaccgggtatggcctgtcctaggctcttaggtatggctgcattgtgaaatgatggctacagagctggcatctcctgtagtctggttcatctagtgcactacctcatagttaaaagaaatctgtttaagccactgagggtggctcctagtgccaactccaagaacaggaagcttcccttttttgggaggaggggcagatggtaacatggatcgtccaggtcaatgggagcagggcaaccacagtaagtactggacaacaacacaaaactccatgtgtggcttccatcgagtccctctccaattggtttggtcttctccgtcccatgcagcactttagcaaggggcctggctgaaggctatgaattgtgtggagcctcctcattgcagtctccaaccatctgatgctgggaaaatgtcaccaggatgcagccatgccgtgtggccaatgaaccgagaaaacaccccttttctagaatgctctaaagaggcagaataatccagaggtgaggaaggaaatactccaccagagacccaggcagttcctacaaaagccagactttccttcacctagggagtgacaagaccagtggaaaacactctcaagcagtaacccccaaatgctctgcaagccagtggcgtccagataccgcacaagcgagtgggctgtctaatcccatcatcatgatgtaaatatctctaggctgccctgggctgtgcctgaccctgtcttcagctttccacacctccacctacagcccatgcacagaaggaccacccaggaatgctgcaagtgtggcacctccagggccacccagggagaaggagggcagctatgctggtggctccaggcccatttggcgggtggtaccttcacaccacaaagcccaaactgaggccccagatttggctgatgagggcatattggacaggggtcacttatgctcttccccattgccacctggcctctggctacctggacttggctacctgtggatcctctcacaggtgccaccatcttggctgagtctccagatgcgaggtccctgaggcagtggcgggcttctcgctaatgctgatgggattaggaatgggataggtggggagggccctggactgggccctgatgagccaagtgggtttttagaggggctactggtacatttcagggacaggacatctggtagagctaagctggggcaataaggagccactgctaatctgagagctagaaacaatcagcttctgggtcattattaattagggtagtttgggctgtgtggaagtcacgtactatatggggtagccacagctctctctacagataatctctaagacttctgattgggactgtgtgaatgcagtagcaatatctcttcttactgccaggccctgccagtcctgcctccacgccctggctggccccccttatgatctgacccatgccaggctgccatagtatgttacttctgcattagcactccttgggacctgcctctccactgtccctcagactttaaagaactatacaaacccaaggggctcttcccaagagaattgatatgacttgaggtgattccatttctggaagtagtcactccattttctgcctcactctttcagtgcttcacagagcaggttcgaacgaaggagccatccaactaaccgtcatgttcgggcaaccgaagaagggagtggcaggatttcctttggagacttctggaattagacagcagtttaatgcaagcatctaaattctctccctcccagagtctcattaaaactacagtaagagtttgtgttttgttttgtttttaaagacaaaatcccaccaggatagagagaataggagaggagataacagcatcataatttatgaaactaaaatgcagatagaccaggattaactgactacacagcaccaaggaagctgaatcacaagacagcagaggagaaaactggaaaggatcgtggtctatacggcagaatcttcccaagcctcaggaggaggagctctagatgttcccagatctgggaggtaaagtggaatggggggacatggtcagcgtaatggggttgggctggaagcaggttaaggagcaggcagatctctgaatcccctctctgactctgtgtccccaggcatctgcctgtcccccaccctggaagaggtctggcttgaccctttgtctggtgaatttcctgctctgctttcctggtcctgctggccggatcagtggaggccactcacttcaccccacagggatgttctgtgttgccctacacctgggaactggaggtactggaggcaggctgtggtgagcttgaaagcaaaacacagagggcagtccaatctctttggccatatttcttctgcatatccaataccatgtccacaactctgctagtgtcctgatggtggtgggctctacacattcccgggaagctgaaggcagataatgaccaggacaggtcaacctctcttcttctgaaagccttcatctactaatggcctgggactcttcccttaaatgcttagattgtgtcttccactaaggttttttgctgttgctgttgtttgtttgtttgtttgtttgtttgtttgtttgttttgagacggaatctcactctgtcgcccaggctggagtgtagtggcacaatctcagctcaccacaaccttcacctcctaggttgaaggggttctcctgcctcagcctcctgtgtagctaggattacaggcacatgccaccatgcctggctaatttttgtatttttggtagagacaggatttcgccatgttggccaggctggtcttgaactcctgacctcaggtgatctgcctaccttggtctcccaaagtgctgggattacaggtgtgagccaccacacccggccaaggtttttgtttgtttgtttgtttgtttgtttgttttgtattgaggcagggtatcactctggtcacccaggctggagtgcagtagtgcaatcacggctcactgaaacctccacctccctggcgggctcaggtgatcctgccacctcagcttcccaggtagctgggactacaggcttgtaccaccactcccagctaatttttgcgtttttagtagagacagggtttccccatgttgcccaggttggtctcaaactctgggctcaagcgatctgcctgcctcagcctcccaaagtgctgggattacaggtgtaagccaccgtacccggccccgccactaaggttttgaaaatgaagcaattacaagtttaagtctattaataagtgatgaagccatgtagaaaagcagaataattatcttggatcaggaaggtcacatgaggatctacttgggggttgtcaatattctatttcttgacctgatcagtgttgacagcaggttttaattttttacttctttttgtttgtttgtttttgagacggagtcttgctctgtctcccaggctggagtgcagtggtatgatctcggctcactgcaacctccgcctcctgggttcaagctgttctcctgcctcagcctccccagtagctgggattacaggcaggcaccaccacgaccagctaatttttgtatttttagtagagactgggtttcaccatcttggccaggctggtctcgaacttctgatctcgtgatccgccctccttggcctcccaaagtgctgggattacaggcttgagccagcgtgcccggcccattttttacttccttattaaactgtacatataggccttgcacacttttctgcatcaatgttatattccacaataaagggaaaaggtatatacacaacttgataccagtaatgtgaaacatatatttctacatagaaaaaaaaatgactgaaatactgcactccaatgtgttcacacagtagttgtttctggattatttatatattaaatgtttatatattgtattatgccatgaggtttgtgttttctctccacttttctgcattttccaagtttactacaaagagcacatattactcttataatcagaaagtcataaaatatatttaaaaagacaaaattgaaactaataaggatcaacacaaaacagatgagccatctgtggaaatccgcacagaatactacctaaagagattggtgacgtgcatgatctcactaggatgagcacaaagcttgccagagcctagggtctatttctagggttggctcttggaagccaggatagttgttatctctgggaagagggaggggcacacaaggggcttctaaaacattctgaatgttctatttctgaacctggttggtgggtacatgactgttggttttattattatatgttttatatactcttccgtatgtatggtgtggattccaaaaaaagatttcctttagagaaaaccagaatcacataagtagaaaatatggtgctatgttgaaggaacaactcaagtttatataaaatcatcatcatttataggcttaaaaagttgctttggaattttggtctaactgacttgtcttttctgcagcaaaccacgctccttctggacgtgctccaggcagaggggattagggtgggttcaaggctgcaagtacctagctcagcacactctcttcaggggacttagagtttgtctggtgttggctctctgagctcttgtcaggaatgccgacccttccgaggttcaggatttgaagcctgccttcccaccccagatttggtccacacagacactcaagtatgtatttcaactacaaatgacctgtactttcctattactcctctctttcatggtaacctttctggtatccttccttccctacatttatgggagggggacatcattctctgctctcctgtcactgaaggctccaccttctgtcttcttctgacccatctggttttcctggggccacctcctctccttaccaccctaacgcttttgtaacttgaggagaaatgagagatcacctagtcaggtcatcattctctgtagatgaagaggcccaatggtttgctcaagaattgccaagcgagttaaagacagagagtatgagagtcagcaagacctacagaaagcatctatctgcactgttttgcagggacttagcctttgtgtgtggactcctggaatgccacccactaagaaacattgtctgacaccaactccccacttggtaggtggggacactgaaactcatggcaggaaagggccttgccccaagccagggcagagtgtcactcatcactctcaattttcagtccagggcaccttgttgtgactatcccaaaggcagccactttccctggtctgaaagacctgaagagagaagagaagagaaggatggaaggcagagtatgcggctttgattcatttcctggtgaaaacagatctatacgagaagcaaatttcacgaaagggaagagaagaaagtgtcccatacgttgctggcctgtttcaaccttgctttgattcttgctgaaaagggtaccgtgtatttctgagttcaacatgcagaccagtgttaggaaagccactgcacctccactttagcctccagggctgtgccctgcaaatggcctgcagccttggtgcctcgctctccagactgcattttggaagatgggacagaggcttatggaagcccacattagaacgggggagcagaatgggtgagatgagggatccttgatagtgaaccagatgaaggaatggtagccaaatgccaggcctcctttgtggcttcaatccaaaggctctggagcccttccagggcagaacatcaggcatgtttacccccactgtcctcaacagtgacagaggtgcaatcttgggcagctggccattttgaaagcaacctccttaatctcaactgggaaggctccctagcaggacccctgtgttgcacacctggaggaagctagactaaccagaagctcagcacggttccatctgggatgcccaggtctgagacgaaaaaggtaactctcttttctgggtcctggcccagttgtgtctctctccacctcattctctgagatgcctgtctccccttttttgtcccatcaggaggcaagagctatcactgggccagactccaccagaagccaagccagcttgttacccagcttctcagggagcaaagaacagccttgtttctatcttatccccactgtcccctgcccctgccccacctcccagccattcagcttctggcttccccagagctgcctgcttctttgtggtcctccattccttgaaaagaccttctagtcattagtgtatataaatggccacttagcccagattacagtgaggtcaacagctggggctctgagaattgtcacacactggcacaggagaggaggctattcttccagagaatttggagggcactcccatccacttacaacaaaaagcccatccactgtgcttggcagtaggtgatctgagaaccaatggaaccaggttaatcctgtggcactgttgagtgaggagagcagtggcgggcactggaaaatatcagagacaaggcaggagacctgaaatctaggcttagctcctcatatacttggcagctgtatgacctcagacaaccagtgttacctctctaagcctcagtttcctcatgcaaaaggagggggaataacaacagagcccactgcttgggggtgttgtgaggacaggatgaaaaaacaaacagaaatccctcagtacaggattcagtgcagtggacagtcttgcaaggtctggttcagccctccacccctaccctcaccagtataaagaactctggcctacaagtcagatgacctgagttttaatctcagctttgccattagccgtgtgaacttgagaaagtccctttcctttttacatctattgggatgatcatgcattttttgtcctttattctgttaatatagtgtgttacattgattgcttttcatagactgaaccagccttgtattccagggataaatctcacttggtcatggtgtataatcctttatacaaatgttgctgggttgagtttgctagtattttgttgaagatttttatgtcttgattcataaggaatattggtgtaccttccccttttatggccacagtttccctacaatgatgtagtcgaactagacaacctccaatatctttcagtattcatgtcctctgattctgtgaaactaagaaaattaagaaatagtgattcataggcacaaggcaggcaaaacttagactccttgtagaataattaggaagccaaatattcagtgtgcttatttctcaaataaccttagtttctccagtctgccccaactccgaggcctgaatatctctagatgcttatgatggcaactaaagcctaaaagctaattcattttaaagttcttccaaatgcatagggttttatttttccagacctgggttcagatggggaatttgacaaacaatggaaagggggaaaaacaacaatctaaacactgagtgacaaagtaacaaagaaatagtctagctatcagccagtcaagccagccttggctttgctatccaaagtagtcagtctaattctaccaccagtttctgttcctgtagctgtctactgcctgccagggactctgccttcccacccacaactaccaatggaaggatgtggtgaccataccagtggctgctgacatctcctgccatgggaagcataattgcctccagcagcctcccccttagatccatcatttttgttgcacttggcctgggctgtactcccggccaatgactgaacatggtgagcatagtaatgcaggcccatttctgtgaggagcaggactcctccagtaggtgactttggctcaaggactctctattggcctggttgaacttttcctgaactgtgctactgtctgagactcttcttacccaatcctctttctcgccccaattgtcacagaccacctgcattgtggtctgagtctctccccaccttctcttgctcttccctgtttatctttcacaggcatttcccccagtacattccttgaatgtctaacccgatacgggtgcctgacttttggcagacctaagcagacaaaaaggagtacttggttacctagctcttctttctaccacaaacatcgagggaaccctttttccctcacccctctgccacacccccactgccccagtgaacaaccacagagagagctgtggtataatattaggctggtgcaaaagtaattgcggtttttgccattacttttaatggtaaaaaccgcaattacttttgcacctacctagtatttgtgtccccccaaattcatatgttgaaacctaacccacaatatgatgtcattaggaggcaagaccttgaggaggtgattagatgatggggtggagctctcctgaatgagattagtgcccttataagaagaagcccaaggaagctaccttgactcttccatcacatgagaatgcagcaagaaggcaccatctactaatcaggaagagagctctcaccagacactgaatctgccagtgtcttgatcttgaagttcccagcctccagaactatgcataatgcatttccattgtctctaagccacccagcctatggtattttgtcatagcagcctgaactgactaagacagtgagccacatgagaagtgccccaacccctcccttaagcacttggctcacagatcagtgggttcatttctgcctgagttttattgttattctgtagatttcttgggctagatatatttttctgttattttccttcttcacctcagtcatgaattggttgttttaaaaaagacaatgtaagtcatggggaaactcctgacaactctactctcctagggttcctgataaaaggggattcagttgagtcctctgatggtctctacctgccaaagtccagcagcccttagcaaacatgctgctcgtttctgtagagaaggtgctggtgtcccaccatacttctctctccctcatgaagggcttgcgacccagcaaatgggtggcttatatgggtctgtttcaaaggaagagccagctctgggaagaaaaacgatgagcataagcataacctaccactgtgcctgggaaagcagacaacttttttgatgtgtgaatatctaatgagaatggaatccatcaattaccttaaacttaggcacagtcttcaaattcaatatatgtgggatatacttttagtcagtttgtagacgttatttgtaataaataatctggcttctctaaagaaattattttaagtgtttggtttggtttgatttaatggtaaaattatatttagtggcagagaattatagcaatggtgataaactatagagtgtcataagttcatatcttattctcacatttgaagctgcctgcagatgcattcaagatgcagccagaagtcaggagactcaggctgttatttggagctcatcattttacagccttgctggactcccactttctcaggggaaaaatgtggtgttgacccagattagctctccaggccctgctgagttgggcactctgtaagctggagggtcttctattgtcttcacctaagtgtcaatcaacaacccaaatgggcatgggggaagagggagctgggccaatgcccagggtgcctggtagagagataccttgggcactggaaggcaccagcttcccagagagaagggggagggccatgaaaaagttggctgtagatgccagggacactgggactctccagctgtgtgtttgtgtcttctgaagacttatgtttcattcctttggagcatgcataatcatacactgtgggatgtgttatatagattgcttgatagttcaccactgtaataaaatactgtgactggaatctgctcccagtctgcctttgatagcacttgtgcaacacacatttactgagcatttacagtgatccaggacctgtgttgtgaaaacattgatggacaaggcagatggtggagcacgtcagtgaggatttttaacaaaggctggtaagtgctataaaggaacattgtaggacactagagaacaaagaacaggagaacctgacttaggctggggtggggcgttggttagaggaggctccttggaggacatgaggtttaagctgtgacctgaggatgaatagatgttggccaggtgaggtaccggtatttgtcagccttaccagtaaaaaagaaaacctattaaaaaaaaaatacacatacaaagcctcatcagccatggcttaccagagaaagtacagcgggcacacaaaccacaagctctaaagtcactctccaacctctccacaatatatatacacaagccctaaactgacgtaatgggactaaagtgtaaaaaatcccgccaaacccaacacacaccccgaaactgcgtcaccagggaaaagtacagtttcacttccgcaatcccaacaagcgtcacttcctctttctcacggtacgtcacatcccattaacttacaacgtcattttcccacggccgcgccgccccttttaaccgttaaccccacagccaatcaccacacggcccacactttttaaaatcacctcatttacatattggcaccattccatctataaggtatattattgatgatg

SEQ ID NO: 192 - DNA, 30158 bp, Artificial Sequence
  HDAd35-T4-Ef1a-SB100-Flpe
  misc_feature (1)..(481): Ad35 5'end
  misc_feature (14103)..(14614): pgk
  misc_feature (14763)..(15785): SB100
  misc_feature (15811)..(16128): BGH pA
  misc_feature (16088)..(16376): beta globin pA (Complementary)
  misc_feature (16488)..(17759): Flpe (Complementary)
  misc_feature (17780)..(18895): EF1a (Complementary)
  misc_feature (29751)..(30158): Ad35 3' end
catcatcaataatataccttatagatggaatggtgccaatatgtaaatgaggtgattttaaaaagtgtgggccgtgtggtgattggctgtggggttaacggttaaaaggggcggcgcggccgtgggaaaatgacgttttatgggggtggagtttttttgcaagttgtcgcgggaaatgttacgcataaaaaggcttcttttctcacggaactacttagttttcccacggtatttaacaggaaatgaggtagttttgaccggatgcaagtgaaaattgctgattttcgcgcgaaaactgaatgaggaagtgtttttctgaataatgtggtatttatggcagggtggagtatttgttcagggccaggtagactttgacccattacgtggaggtttcgattaccgtgttttttacctgaatttccgcgtaccgtgtcaaagtcttctgtttttacgtaggtgtcagctgatcgctagggtatttaccggtattcaaggattacatgagcttagaaatgtaattagcatagtgtgtggcatagtgtagataccaaataaatatgatctctccttctactcttgaaaatgcaaacacattcttggtggtcctaaaatagcctgtaacatggtttactcagcagcatttgctattcaaggcagatctgcctttagtcattggctgcgctcctgaacagctgtgtgaaaggctaacttttgtaaaccaaatcaaaataaaatgcagcaaaaatttgtcactgaaaggaaatcctcagtatatccttttatgaaatgaaagatccctcatccaaacttaacttttttaaaagtgcgcatttggagatatagccctttcttatgaatcctaattcaattttggccataaacacacgttgatgttccccaccccaaagcacatagcaacaagagtaggttctatattgaaaataatgacaatttaaaaacatgtacttatttcactgtatgtggacagtgtctatgattgcatcatgaagtgtcatataaccatgtacgtgtacatgagagagagatagagagagaagtggtagggtggtggtggtagaggggatggcgatagtaatcatggtaatggtagaggtgatggaggtggtaatgacggaggtaagggtggtagtgatgatggtggtggtggtaatggtggtggatgtggtggtggcaattgggatggtgggatggtggtagccatggtgatggtggtaatggtgttgatttaaagggtggtggtagtgaaggtgagggtagtggtggtggaggtggtggtgctggtagcaatagtgatggtggtgatggtgttgatgagggtgttgggatcagggtgagttcccacagtatatttcattcttgttgtaccactctgtcaacagcaccactgactgggacagaggaagaaggcacactctgaatgtgttattaacagaaacctcaaaacagtctgtctccttgtagtcattcaaaattatctttttcttacctggaaaactgaaactgaattaccgggaaaaacacaggagatttttgtttgttaatatgctgccaataaagtaattttatgtcaaatttaactacaggaaagggcaaggcattttctaagttccttagatgtcatgtggctaaaaaaaacaaaaggatggacagcagttagatactgtacacttagctgtttgaagccatatattcagaaagcagatgttgggagttggtgtttgaggactgatttcctggaggtattttatataggccaagttcattgttctaaactctaagggcttgacttgagggaggaaaagaggcaagaacatgtttagttttgctgacagcatcacatgggcagccctaaggctagacaactttagggcctgaagcttattctaggaaagaagcacctacagagtggcactgggctcccctccactatagagatgaagtcatatgacagtaaagggcaggcagggctgcctagggggcccagaactgacacttccattagaatgagcacaggccagggagagaagtggggaaccagagagaaggagctggaattctagtaggacaaacggtaagtgaacaacaagaacaagttaagagtgtgtgcagtattctttcaaagactgaaaaaatagtgatgtgatagaatggcaggtggctctgagcaggccaggagaaggactgggggcagagcatcccaggcaggagggcagcaagtgggaaggccctggggtggggcttttggactgttccagtgacgggcaggcagccagtgtgcctgtcacacaatgcaccagggaagtagtcgtgaatttgcagagggtcttgcaggctatgggaaagggattggattgtattttgtttgtagggaagccatcgggggacttaagcagaggaaggattggcttcatctctttgaaaaagttctctctggatgctgatgggaggagaaatggaaggaaaagaaacacttttaggggcaagaacttttgagaagggtggaattgggagtgtggagttggggccagctttggcacaggaggggaagctaaacacgtggccgcatgagggcctgtaattctacctgaaatgggtaccatttgttagggtaaacaaatgaaccaaatgcccagtgatacagaccaagtgttggcaaacttcttctgtgatggcccaggtagtaaatgtctcaggcttcgcaggccatgtggtctctgttgaagctctgtgtagtagacaatatgttaatgactgggcgtgactgtgtgctaataaaagtttatttacaaaaacagcccgtgggctggatttagctcacaggctgtagtttgccaacctctgacctagagcatgaactgagcatcttcttggagggaaataagttctttccaagttgccctcctcacattgcagggggccatgtaggcccattattcacagaagagtgggtgggcaacctttctggagcagaaaaacgtaaagatttcttccgtagtgcaagtaaggtgaccatttctaaaccgtgcaagtgatccagcagtcccaaaagttgtttcacttctcattgtgcgcccgttctcaggtgctccgaagcttccagtcctttgtagggacatggatgaaattggaaatcatcattctcagtaaactatcgcaagaacaaaaaaccaaacaccgcatattctcactcataggtgggaattgaacaatgagatcacatggacacgggaaggggaacatcacattctggggactgttgtggggtggggggaggggggagggatagcattgggagatatacctaatgctagatgacaagttagtgggtgcagcgcaccagtgtggcacatgtatacatatgtaactaacctgcacaatgtgcacatgtaccctaaaacttaaagtataataataaaagaaaaaaaaaaagagaggagagaaacatcatcccctccaggatacccttgggccttgttcttatagtcttgtacattgttgaacaatttgcatgggctagtggattaaagcacaccctccaccctcaggccctcaagggtctctatgataatacagtctcaccttctaccctttccatcaccatcctaggtgctatggccaaccttgaggctgccatgttaggtctatgcatttcccacctccaccacataactctctgaaggccaggtagtttcctattcatcttggtaaccccaaagcctcgtgacagggctcagctggcatctgcggatgtgaatgaaccattggagaaaatggtactctgcaaataactctgttattttcccatttcctgtgtaaggcctagagacaatgactttttaattgcaccccttcccctctgtatgacactggccttctcttgtgtccagcaatgtgggtggcctagatgatttctaagggacttctggccaagatgaacagcagctgcatcttactgagcatttactatgtgccatatactcagccacagctctaggggcatagaagcaggagctctcagggtcagggcagtgagtgagcaagcgagcacctatgccagccctgcctctggatggggacttgagagggtgatggaagcctgcagcactggagggaggcagacaaagacaggcctgtgctgagggggcccggagcaagagagagggaggcaatgacagcagagacatgcctgcgccttgggtttgagtgcccagtggtcaaatccacttccctgtggctgatgcttgcctttctaactttggaatttaggggttggagatctggtgagaaggtaggagggagatgaggaggagaagggaaaggcaggaaggaaggggagggaaaggaaaagcaaaaggggaggaggaaggtttccaacaaattattctatatcaactgcggaaatcaaaatttgttgcccaaatcttagaagctcatgtccctcctccccagaagtctggaatgcagcactccaggggtagcttataacccaaatatctatctgtaaaaagagaaacattgggctttcgagctgtggattctcagtaaaagcaagaggcctcagcctacacaggccagcccagagtttgaggaaccccaggcccacacccacagggctggcccctgggtctgcatactccctagaaatgtgcacacttctgagcctcaactctgtcctggagtctaacagcatccctctccttcctggggcagttccacctccagaaacctgttaccttgggccttatgtcaaggaaactgtgggaaagagctaggcaggaatgcagatgaggccagcatgggctcctaaaagtttagaaataggcagtgtcatgctcccaggtgcctgcataaaccagctgaaaaatggagctcccctcaccagcactctcccttcaaacagactgtgatttgcaggtcactggtttaccaagccaggctacccaggcaggacccagatgccaagcccagtggtgtcctgcaagctgagcagtgctcagttcttgcaaaaaaaggtctgtgtgaaggcaaggcctctgcctggcttctcaccccagttgggtgtctggaacaggaaggagcccttactgcagaaaaaggaggagggagcaaagggagcgaacagctgcgtgctccatggggaggatccccaaagtagaaaggcgcatacacactgcagcccttgacccagaatgctcacagctacattacagattcaggtctcctcagtgtagtggggctgctgatgagactgtggcatcctcaggggtcaggacacacattttccatcactcttctgatggcaaaaaacctctgagccaatgccaacctctgatcattaaaaaaaagtgctcacagcagtgtgtggtttaggatcatgccctgtgtggtttggaacacgtgcacaaccacaccttgttcatcaccatcccagaaaccctgacgcaggcaaagagcagagttattaaccctactttactgatgtggatactgaggcccagaggctcatgcaagttatcaataagtggcagggacagttgcctctagattaactagcccctaggatcacctgggtcttggaaggggacccataaacatgagctcccctctcttggggccagatttgcacctgtgccgcgccttcagcctgcatgaagtaggggctgctggcaaagactcaaagctgtaaatctgggttttctcttgaggcttctaagggagctgtttcgacaactcactctgttcccagctggctgcccctgcatagggttttaaagcagcctagctttctgccaggcttggcagtggacaacgctggtcagaacatcccagagagctaccagaatgaagtaagtttgcttctactctttacctgtttatgggctgtctctgccactggaatgaaaggcactgagaacagtgcctggcctgcagaaggccctggaaatacctgagctcctaatctgggaataggagtaggaagagctttggaggcagggcacctgagtttgagatctacaacttcctgcctgtgtgacattgggaaagtctccatcctttctgagcctcagtctccaccctggggaagtggaaatatcaatctctgtgacacagaagcaaatgagcgaatgtgcacaaagtaccttgcacaagagagacgctcaaacacttgcctccaggtttcaccgagaactacagagtaagatagatttgttcccagtggaggaagcctgggaataatttgcccctagactatgaattcctggggctcaagatcgagcacagggccaggcacacagaagggaccctggaaatgtggcaggaggccagagatagacaggcccttagagctcatacccatgccctctgacctcaagaagaaagaaacctgctcaaaatctcacaaagagcttgttccaaccctgaatcgagtctgaggactccttcctgagtccagcactttttctgcaagaagtatatgcctccaaagctgatgggcgcaaatcttgaaccccgtcacataaacacaaagggaggaggtgactagagctcctcctactggatatgtctaaggtcaccagtctaaagaaaagggatggatagaatgaggccagtatttttgcagccatccaaatgtccacatacgctgttacactgagggctcctctctcccccgtcttcagccctacttgcatttagaggtgagaaagatatgggctgaggggttgtttttcatcgtattgtagatggaaagcacactgcccttggggccatccaaatgtggaccttgatgtagcaccccaccttctggatggccatccttctgaaagtcactgaatttctcagactttattctctttatccataaagaaggagaataataataatccccccaccctgcccaaccactgactggttgggaagctcagaagaaatactgggcacggcatcccattgtaatctatagagtgagtcgcttcttaatattaaatggctgaacacagaagatgtgcaaaaagtactgtgtccccttcctcctccaactgaacatttcatgccctttgcaccctcattttgtctaggagctgccttatgaagggaataggtacctgctccgagctggaggaatctttgccacttatggtggggtatggactgagacagagatggcatgtgacatgcgcactgagtctcaactccatgcaggctctggagcactctcaaattggagtactaatgccttttaaattctcacactagcaatcctttgacctactgatctagggatctagggaaagaatcgtgatcttaacttcaaagggaaggacaaaatgttctgcctcctgttaaaactccatacactaagtgcagagactggatgccttattaaccttgggtagatgcccaaatgttcaaaaggtcaaactcttctgttccccagatcgccagagtcattaaccagtcacactattaaatgaatgaacagatgctgaaaaggtacttgcattactgagatttcttatggtgatggcccctgcctgatatgtattcagcattttgtagttttcaatgtgcattagagtatagtggtgatgacattggcctctgagtttgccacttcttatatctgtgactttggtcaaattgcttaatctctctgagtctcggtttcctggagataataatagcttcttcttcccagggttatcatgaggattacaggagataatgccccaaaaatgcttagtaaagtgcctagcacctagtcaatgctgaattaaaggtggttattcttacttttcgttcatttgaactttgttctcagggagggcaaaggatagacaaagccccatagctagtgaggagtagctgcaagactagaacccaggtgttctgagccctagtcttaggccaagaacaactgttacgtgagatgcacgttttccttcaagggagctcacaattatttccatgtaaattcaaggactgctaaaagagaactctcctctgggactgatatcattttatttcaagattgatttgaaacatgttttttgtttgtttgtttgttttctaggaaagaacaagagaaccagttaagctgaatgcctgaagcaaatccctgttagcgatgttttcaggatgagggagagtggtgcaagaaacgtgcttccagatgcacatggtttcctgggactagggttcagggtgtcatccctgggtgttattaagtgtcagaaggagagcaaacaagggaaacatctgagatccagctaaggctacaccctggaaatgcaagcccagctcttgcaaaggacctcctttggccactcaccttccaggccttacaataacttgtttggactgcaggtttcttggtggactcacaggccattctgcttttatttggtcaacctcagttcacaagcacccagatgctgagatcctcagcatgtgcagcagagtttcatattagcactgggtacctttctgaggctacagggataccgtacagcagcacctgtcacgtccagccaaaggagtgggctctctcaatgtcatccaatgctgtttcaactgtgaagaagaccatctgagagagttgcttttggaggctgaggcaaatttttaaaattctttgttctcctcaactggggtgaattcttggtcttctaggacagcttgaagttttagaaagagtcaagccactcagaaccaacagagaactctttcagagaacaaggtgtggcatagaggaggcagagggctgatcttgatcaaatccaaagtgtgactctaaagcaatgaatgtgaatttttggcaaagcttacaaagggctctaaaggccatctgcaaagagaagccaagcctgatcgatgaatcactagtgcggccggatatcgatcggcacgctgttgattttctcatagtaaggaacagtgggccctttcagtcccacttctgtagtctgtggtactacaaatggtgagcccatgatgttgccattcatagggttattctccagcagtaatgactggccagccactcccatagccgcggggctaggatttattgtcaatggagggacctgcagttctgcacaagcagtactaggatgagcacctgggcccattgcaagggtgacatcttcaaggcaaggcctcttaattttattagggtagcccccatcagccatgtctggaaactggaagtggtcttcttcttgtctcctcttaacagttccctgtgaatggaagagaagagaggaggagaagagaggagaggagaagggaagagaggtgacacacacacacacacacacacacacacacacagagagagagagagagagacagagagaaagagagagagagagagagaggaatttttataaaggtttggcacattaaagctaatgaacaggaaatgtgcatgataaaacagacctctcagtttaaagacttatagttgtgaaaactataaaatacagcctgtctttggaaccatagtgcttatttattcattattatgtttcatctaaactgtctaattacatttcaaataaggcattatgttgtctgtatactaaaacgggatagaacgttattcaaagggtaatctgcccacttcaaggagagttcaacaaaactatgcagaagtcactaaatgaaccatgctgccaaaggcaggcattggagagaaaactagaagtagctaaatagttttaattctttcctgtctacagacacatagattttaacgaaggaataccatagtatagaattgaacttttaggctgccttctagtcttggttaaatgcatcaggctgcagtggtaaaattgaatacaacagagcccttacaggaaagaagtagatctggatgtgttttcttggggagctgtttaaaatactgtttttgggaaagcacaagtttcagaacagtcattgtaggcatcgtattcattgttccatttatttttacacacacacacacacacacacacacacacactctcacacattgctatgtgtacacaaaaataatttggaagaacctatacccaacaatttggagtggtcatttatttgggatgactggcaattccctttctattctcttcatttctgcttgtttgtctttaacgagaacgactcataatccaaaaatttaaaaaagtataaagttatctaaataagaaattttcctctgaagatgcatcctcaggttggggagatattaaacaatgagaaaaggccccaatctgggatctgaaccttgggggagctgcccatcatttatagaagcacagcctttgggaacaaagcaaagtcactagcaatgtgagacttcctactcttcatggcttcatacagtcatccatcgctgttgtgttaatgaccatgacctgtatgttagcaggtaaatgggaaaggaagtgggggcaaaggagtatgtgcaggaatgatcaaaataaggaaaggaagagagggatctggaaatcacctgaatgccgataggtgaacaggtagaattcttttaaagcttcccccacccggtaccccccaaataacccctttccagctttggaagtttcactaggacatacagtgctcatcctctgatgtcaccttaagtttggctcttctggtttgatgagcttgtagcccactaggagctcaaggcatgcatggggccacttgccagcacgatgaggggcatgactgtcatggccaagtgaacatcaaagcagatccccagggctgtatgtctcaggccttggtgcacatcagaatcacttagaaacatccacattcctgggccctcccaccacaaactgacagcttcatccagggtgtggcccaggcatcgggagtttttccaacagctccatggctgattctcaacagaaaaccactggcccagagcaagggtggaggcagcgtggcatagggctctgaccttggccttgccactgaacctctcagagccccagtttctttatgtgtaaaatgagtgtaattatagttcttttctcatgaaggtgctctgactattaagtgaaacggggcacattgtatgacacctaatagctcctcactaactggtacccggcattataaagggcaggtatggaagggttctgggagtccaatacccttcttaaagacagagaggtctctgagacccagagaggggcaggccttacccagagttgctcagccagagggcaacaaggcccaggtcagatgcagggcccctccaccaccactcagctgcctccagacccactgccttcgccatgttgttggtaggacactgcatcgcccccacagaaggggcttgccaacttgagtgagaggacttgcacacttctttgacttttcttttgagatgcccacaatctgaacaagggcacttcaagggacagctctgtcaccaaactcatctgaggcctgaataccatgggtcaggcaggaatgggttggagaggtgtagagcaggcacaataagagggctgaggcccatgcagtcatcagtgcccactttcccaggagtctgactgggcacagcacccatagtgtccctgagctggtccatggagcagctcactaactgtttggcccacagcaggtgctcagtaaatggcagttgaacgaatcaatggacaaaggaacataaattacccaacacacagggagctcagccatttactcaatccattatggagtaacctacaaacaagccactgggtcccaaactgaaattgtgtctcttctacattctcccaaagaatccaataggttaaaaatagaaatgtatgaaatagatcaatcagggatgattgcatgtggatttgacataaggatcccctgcagggagtctgagctggcaacagtcaggcccaaagtgctgtccatgatgtctcgaactgcaagacagttttaacaatggcgaagcaatgcagaaccaggcaggccaaggagggggtgggggttggggaaaggaagggagggaaggggctgtgaggggcaatggtctggcatccctgccacgtgagcctctgaaatttgctggcagcttctatgggctcccagagctttcacttaattgttggtctgccactaacctgctgggagtaaggtgcagggatggaggaggcagggcatgaccaccagacactaaaggtaccagctggggccactggcaaagggaaggaggctgcacctctcctacatgagagcccgtatacacacaccttttccagcactcatcaactgcatcccaagcaaatggtccctgatcaattccaattctagaaaccaactgactactcaataacaaagtagatcccagcaggccgccactgctggagcggatgccacttttgctatgccaagtctgtggctggacagctgctggcatgtacactcactgactttcataaggatgcctaataaagggggcaggctcacctggcttttctcaggggtggggtttggggtgccgatagaggctgctgttttggcagagtggcaagctgcaagcctcttctgagctttcatttttcaatggacttcagtgagaattcactttgtcagaggccatgcagctccatgttttggatttcatggaatgagctttcaacagtgagcctgaagtgccctggctgaacagcaagaacaccagccaaccctaaacaaggccgaggagaggcggctgtgtttacacggaaggctcagccttgctgtaatagcgtctgccttcaccagacatcagtgaggcgtggaaatctattatccagttaattttgcccctagataaagacttgctttcgtgtcttctctttcacagtcccatgatctgttactcatctcaactgcgagaagttggctgggctttcccctgtgcccagtgccacactcgtgccttcactgggtcacctgtgcctgtggctgatgccgctgaggttttgcctgcccagactgggtgtttctgactaaatcccacagccaccattttagatcaagggcaggagatagctcactgctccggaatgacctcccctcccagaatcctggtaggggcggaaggtccccaaccaagctcccagccctttctaaatgaatctccctgcttcacccatgtgcttttctccagtctctgcggtcttgatgacagcagggtattagtcctagctgtcccacagctcctacttctttcaggcctctccctgtgacaatcagtagccactggcaggatttcctcagagcatatctcgatttgctttcagacaattagttaaaaggacactggaccccagacgtcccaactcccagccagagccctcacaggcccggcctttggtggtgaggaagggggagggagtgagtgacagtgccctggcatcttttagaaacgaattcctttctctccatacataaatgcctgcagagtcccatttcagaatccggcagacaaagccaccaatgtgatccccatgaccttataaacattcattaaaatgcatttcaaggcatgtgatggcctccccaccccctagataatgagaaaacaaaggtttctcttctgatagagacaagttcagctctgaagtcaacattatttctggttctgtctgaacaatgacatatggcaactcttccctttctatagttctagtccagaatgacaaaaaaggggaaaaatttcttagagaaggtagagattatacgaatacagtccatgaaatgagcataaggagaataaagaatataacttatccaaagaagtctggcaggctgttataaatgcttgattttggacactgtagttggaggtttaacatggacaccaataaaaaggtcagcaaagggtatgcactgttcctattgggcaagaagataggaggtcaaaggtaaccaggaaagataaactcagggagacttattttccctccagagggcactgggcttgtaggccctgggcaaaattgtcaaaaaggtgaaaatcgcctgtggtttatttagtctgctctttcttcactagtgcctcaccagttcagttcaggccaatttgctaggaattctaccgggtaggggaggcgctttcccaaggcagtctggagcatgcgctttagcagccccgctgggcacttggcgctacacaagtggcctctggcctcgcacacattccacatccaccggtaggcgccaaccggctccgttctttggtggccccttcgcgccaccttctactcctcccctagtcaggaagttcccccccgccccgcagctcgcgtcgtgcaggacgtgacaaatggaagtagcacgtctcactagtctcgtgcagatggacagcaccgctgagcaatggaagcgggtaggcctttggggcagcggccaatagcagctttgctccttcgctttctgggctcagaggctgggaaggggtgggtccgggggcgggctcaggggcgggctcaggggcggggcgggcgcccgaaggtcctccggaggcccggcattctgcacgcttcaaaagcgcacgtctgccgcgctgttctcctcttcctcatctccgggcctttcgaccgttgatccggtggtggtgcaaatcaaagaactgctcctcagtggatgttgcctttacttctaggcctgtacggaagtgttacttctgctctaaaagctgcggaattgtacccgcggaattaatacgactcactatagggactagtaccatgggaaaatcaaaagaaatcagccaagacctcagaaaaagaattgtagacctccacaagtctggttcatccttgggagcaatttccaaacgcctggcggtaccacgttcatctgtacaaacaatagtacgcaagtataaacaccatgggaccacgcagccgtcataccgctcaggaaggagacgcgttctgtctcctagagatgaacgtactttggtgcgaaaagtgcaaatcaatcccagaacaacagcaaaggaccttgtgaagatgctggaggaaacaggtacaaaagtatctatatccacagtaaaacgagtcctatatcgacataacctgaaaggccactcagcaaggaagaagccactgctccaaaaccgacataagaaagccagactacggtttgcaactgcacatggggacaaagatcgtactttttggagaaatgtcctctggtctgatgaaacaaaaatagaactgtttggccataatgaccatcgttatgtttggaggaagaagggggaggcttgcaagccgaagaacaccatcccaaccgtgaagcacgggggtggcagcatcatgttgtgggggtgctttgctgcaggagggactggtgcacttcacaaaatagatggcatcatggacgcggtgcagtatgtggatatattgaagcaacatctcaagacatcagtcaggaagttaaagcttggtcgcaaatgggtcttccaacacgacaatgaccccaagcatacttccaaagttgtggcaaaatggcttaaggacaacaaagtcaaggtattggagtggccatcacaaagccctgacctcaatcctatagaaaatttgtgggcagaactgaaaaagcgtgtgcgagcaaggaggcctacaaacctgactcagttacaccagctctgtcaggaggaatgggccaaaattcacccaaattattgtgggaagcttgtggaaggctacccgaaacgtttgacccaagttaaacaatttaaaggcaatgctaccaaatactaggggccctaaccgcggggatcaacgcctagagctcgctgatcagcctcgactgtgccttctagttgccagccatctgttgtttgcccctcccccgtgccttccttgaccctggaaggtgccactcccactgtcctttcctaataaaatgaggaaattgcatcgcattgtctgagtaggtgtcattctattctggggggtggggtggggcaggacagcaagggggaggattgggaagacaatagcaggcatgctggggatgcggtgggctctatggcttctgaggcggaaagaaccagctgggggttacctactttctttatgttttaaatgcactgacctcccacattccctttttagtaaaatattcagaaataatttaaatacatcattgcaatgaaaataaatgttttttattaggcagaatccagatgctcaaggcccttcataatatcccccagtttagtagttggacttagggaacaaaggaacctttaatagaaattggacagcaagaaagcgagattagatccctattatttttgacaccagacaagttggtaatggtagcgaccggcgctcagttggaattcgctagccgcacatacagctcactgttcacgtcgcacctatatctgcgtgttgcctgtatatatatatacatgagaagaacggcatagtgcgtgtttatgcttaaatgcgtacttatatgcgtctatttatgtaggatgaaaggtagtctagtacctcctgtgatattatcccattccatgcggggtatcgtatgcttccttcagcactaccctttagctgttctatatgctgccactcctcaattggattagtctcatccttcaatgctatcatttcctttgatattggatcatatgcatagtaccgagaaactagtgcgaagtagtgatcaggtattgctgttatctgatgagtatacgttgtcctggccacggcagaagcacgcttatcgctccaatttcccacaacattagtcaactccgttaggcccttcattgacagaaatgaggtcatcaaatgtcttccaatgtgagattttgggccattctttatagcaaagattggataaggcgcatttttcttcaaagccttgttgtacgatctgactaagttatcttttaataattggtattcctgtttgttgcttgaagaattgccggtcctatttactcgttttaggactggttcagaattcctcaaaaattcatccaaatatacaagtggatcgatcctaccccttgcgctaaagaagtatatgtgcctactaacgcttgtctttgtctctgtcactaaacactggattattactcccagatacttattttggactaatttaaatgatttcggatcaacgttcttaatatcgctgaatcttccacaattgatgaaagtagctaggaagaggaattggtataaagtttttgtttttgtaaatctcgaggtatactcaaacgaatttagtattttctcagtgatctcccagatgctttcaccctcacttagaagtgctttaagcatttttttactgtggctatttcccttatctgcttcttccgatgattcgaactgtaattgcaaactacttacaatatcagtgatatcagattgatgtttttgtccattgtaaggaataattgtaaattcccaagcaggaattaatttctttaatgaggcttccagaattgttgctttttgcgtcttgtatttaaactggagtgatttgttgacaatatcgaaactcagcgaattgcttatgatagtattatagctcatgaatgtggctctcttgattgctgttccgttatgagtaatcatccaacataaataggttagttcagcagcacatgatgctattttttcccctgaaggtctttcaaacctttccacaaactgacgaaccaggaccttaggtggtgttttacataatatatcaaattgtggcatggtggaagcttggcatgggaattcctcacgacacctgaaatggaagaaaaaaactttgaaccactgtctgaggcttgagaatgaaccaagatccaaactcaaaaagggcaaattccaaggagaattacatcaagtgccaagctggcctaacttcagtctccacccactcagtgtggggaaactccatcgcataaaacccctccccccaacctaaagacgacgtactccaaaagctcgagaactaatcgaggtgcctggacggcgcccggtactccgtggagtcacatgaagcgacggctgaggacggaaaggcccttttcctttgtgtgggtgactcacccgcccgctctcccgagcgccgcgtcctccattttgagctccctgcagcagggccgggaagcggccatctttccgctcacgcaactggtgccgaccgggccagccttgccgcccagggcggggcgatacacggcggcgcgaggccaggcaccagagcaggccggccagcttgagactacccccgtccgattctcggtggccgcgctcgcaggccccgcctcgccgaacatgtgcgctgggacgcacgggccccgtcgccgcccgcggccccaaaaaccgaaataccagtgtgcagatcttggcccgcatttacaagactatcttgccagaaaaaaagcgtcgcagcaggtcatcaaaaattttaaatggctagagacttatcgaaagcagcgagacaggcgcgaaggtgccaccagattcgcacgcggcggccccagcgcccaggccaggcctcaactcaagcacgaggcgaaggggctccttaagcgcaaggcctcgaactctcccacccacttccaacccgaagctcgggatcaagaatcacgtactgcagccaggggcgtggaagtaattcaaggcacgcaagggccataacccgtaaagaggccaggcccgcgggaaccacacacggcacttacctgtgttctggcggcaaacccgttgcgaaaaagaacgttcacggcgactactgcacttatatacggttctcccccaccctcgggaaaaaggcggagccagtacacgacatcactttcccagtttaccccgcgccaccttctctaggcaccggttcaattctagtatcgataaataggggattacttgaacatagactgtgggatccggtgtggagtgcgggagactagcaaagtgaatcctgagagtagcaggtctgcacctgttggatcgagaaaggcggcctacaattctggtcaaatgagctgtgcttattgacatattctattagagagtactaccaggtcaccagtcaccagaaaggctgccagctctccaaccacctccagggaactatcctgaatggggccttaacaagtctaagagagggttggtttgggtcccaagccaatatttgctctgctttatgtcagtcatatggaacccaaaccaaccctctcctatgtgcctcaccagtcggtgcagggatcccaatttcaagtttggttttttatggtcaaagtccagcatagattaaatgaaggggtgtgatgatggtgttaaaagagaactccagaccagtttaactcttggacacacatcccatctcaccatggtgcttccaaccttccagagatgatgggctcctattttctgatgacaaagccctccacaggattgctgcctggccatcagggagtgcctctgtaactgaggctgagatcccactttcagtcctccagctgtggcccatccctgctccgcccaccgggtatggcctgtcctaggctcttaggtatggctgcattgtgaaatgatggctacagagctggcatctcctgtagtctggttcatctagtgcactacctcatagttaaaagaaatctgtttaagccactgagggtggctcctagtgccaactccaagaacaggaagcttcccttttttgggaggaggggcagatggtaacatggatcgtccaggtcaatgggagcagggcaaccacagtaagtactggacaacaacacaaaactccatgtgtggcttccatcgagtccctctccaattggtttggtcttctccgtcccatgcagcactttagcaaggggcctggctgaaggctatgaattgtgtggagcctcctcattgcagtctccaaccatctgatgctgggaaaatgtcaccaggatgcagccatgccgtgtggccaatgaaccgagaaaacaccccttttctagaatgctctaaagaggcagaataatccagaggtgaggaaggaaatactccaccagagacccaggcagttcctacaaaagccagactttccttcacctagggagtgacaagaccagtggaaaacactctcaagcagtaacccccaaatgctctgcaagccagtggcgtccagataccgcacaagcgagtgggctgtctaatcccatcatcatgatgtaaatatctctaggctgccctgggctgtgcctgaccctgtcttcagctttccacacctccacctacagcccatgcacagaaggaccacccaggaatgctgcaagtgtggcacctccagggccacccagggagaaggagggcagctatgctggtggctccaggcccatttggcgggtggtaccttcacaccacaaagcccaaactgaggccccagatttggctgatgagggcatattggacaggggtcacttatgctcttccccattgccacctggcctctggctacctggacttggctacctgtggatcctctcacaggtgccaccatcttggctgagtctccagatgcgaggtccctgaggcagtggcgggcttctcgctaatgctgatgggattaggaatgggataggtggggagggccctggactgggccctgatgagccaagtgggtttttagaggggctactggtacatttcagggacaggacatctggtagagctaagctggggcaataaggagccactgctaatctgagagctagaaacaatcagcttctgggtcattattaattagggtagtttgggctgtgtggaagtcacgtactatatggggtagccacagctctctctacagataatctctaagacttctgattgggactgtgtgaatgcagtagcaatatctcttcttactgccaggccctgccagtcctgcctccacgccctggctggccccccttatgatctgacccatgccaggctgccatagtatgttacttctgcattagcactccttgggacctgcctctccactgtccctcagactttaaagaactatacaaacccaaggggctcttcccaagagaattgatatgacttgaggtgattccatttctggaagtagtcactccattttctgcctcactctttcagtgcttcacagagcaggttcgaacgaaggagccatccaactaaccgtcatgttcgggcaaccgaagaagggagtggcaggatttcctttggagacttctggaattagacagcagtttaatgcaagcatctaaattctctccctcccagagtctcattaaaactacagtaagagtttgtgttttgttttgtttttaaagacaaaatcccaccaggatagagagaataggagaggagataacagcatcataatttatgaaactaaaatgcagatagaccaggattaactgactacacagcaccaaggaagctgaatcacaagacagcagaggagaaaactggaaaggatcgtggtctatacggcagaatcttcccaagcctcaggaggaggagctctagatgttcccagatctgggaggtaaagtggaatggggggacatggtcagcgtaatggggttgggctggaagcaggttaaggagcaggcagatctctgaatcccctctctgactctgtgtccccaggcatctgcctgtcccccaccctggaagaggtctggcttgaccctttgtctggtgaatttcctgctctgctttcctggtcctgctggccggatcagtggaggccactcacttcaccccacagggatgttctgtgttgccctacacctgggaactggaggtactggaggcaggctgtggtgagcttgaaagcaaaacacagagggcagtccaatctctttggccatatttcttctgcatatccaataccatgtccacaactctgctagtgtcctgatggtggtgggctctacacattcccgggaagctgaaggcagataatgaccaggacaggtcaacctctcttcttctgaaagccttcatctactaatggcctgggactcttcccttaaatgcttagattgtgtcttccactaaggttttttgctgttgctgttgtttgtttgtttgtttgtttgtttgtttgtttgttttgagacggaatctcactctgtcgcccaggctggagtgtagtggcacaatctcagctcaccacaaccttcacctcctaggttgaaggggttctcctgcctcagcctcctgtgtagctaggattacaggcacatgccaccatgcctggctaatttttgtatttttggtagagacaggatttcgccatgttggccaggctggtcttgaactcctgacctcaggtgatctgcctaccttggtctcccaaagtgctgggattacaggtgtgagccaccacacccggccaaggtttttgtttgtttgtttgtttgtttgtttgttttgtattgaggcagggtatcactctggtcacccaggctggagtgcagtagtgcaatcacggctcactgaaacctccacctccctggcgggctcaggtgatcctgccacctcagcttcccaggtagctgggactacaggcttgtaccaccactcccagctaatttttgcgtttttagtagagacagggtttccccatgttgcccaggttggtctcaaactctgggctcaagcgatctgcctgcctcagcctcccaaagtgctgggattacaggtgtaagccaccgtacccggccccgccactaaggttttgaaaatgaagcaattacaagtttaagtctattaataagtgatgaagccatgtagaaaagcagaataattatcttggatcaggaaggtcacatgaggatctacttgggggttgtcaatattctatttcttgacctgatcagtgttgacagcaggttttaattttttacttctttttgtttgtttgtttttgagacggagtcttgctctgtctcccaggctggagtgcagtggtatgatctcggctcactgcaacctccgcctcctgggttcaagctgttctcctgcctcagcctccccagtagctgggattacaggcaggcaccaccacgaccagctaatttttgtatttttagtagagactgggtttcaccatcttggccaggctggtctcgaacttctgatctcgtgatccgccctccttggcctcccaaagtgctgggattacaggcttgagccagcgtgcccggcccattttttacttccttattaaactgtacatataggccttgcacacttttctgcatcaatgttatattccacaataaagggaaaaggtatatacacaacttgataccagtaatgtgaaacatatatttctacatagaaaaaaaaatgactgaaatactgcactccaatgtgttcacacagtagttgtttctggattatttatatattaaatgtttatatattgtattatgccatgaggtttgtgttttctctccacttttctgcattttccaagtttactacaaagagcacatattactcttataatcagaaagtcataaaatatatttaaaaagacaaaattgaaactaataaggatcaacacaaaacagatgagccatctgtggaaatccgcacagaatactacctaaagagattggtgacgtgcatgatctcactaggatgagcacaaagcttgccagagcctagggtctatttctagggttggctcttggaagccaggatagttgttatctctgggaagagggaggggcacacaaggggcttctaaaacattctgaatgttctatttctgaacctggttggtgggtacatgactgttggttttattattatatgttttatatactcttccgtatgtatggtgtggattccaaaaaaagatttcctttagagaaaaccagaatcacataagtagaaaatatggtgctatgttgaaggaacaactcaagtttatataaaatcatcatcatttataggcttaaaaagttgctttggaattttggtctaactgacttgtcttttctgcagcaaaccacgctccttctggacgtgctccaggcagaggggattagggtgggttcaaggctgcaagtacctagctcagcacactctcttcaggggacttagagtttgtctggtgttggctctctgagctcttgtcaggaatgccgacccttccgaggttcaggatttgaagcctgccttcccaccccagatttggtccacacagacactcaagtatgtatttcaactacaaatgacctgtactttcctattactcctctctttcatggtaacctttctggtatccttccttccctacatttatgggagggggacatcattctctgctctcctgtcactgaaggctccaccttctgtcttcttctgacccatctggttttcctggggccacctcctctccttaccaccctaacgcttttgtaacttgaggagaaatgagagatcacctagtcaggtcatcattctctgtagatgaagaggcccaatggtttgctcaagaattgccaagcgagttaaagacagagagtatgagagtcagcaagacctacagaaagcatctatctgcactgttttgcagggacttagcctttgtgtgtggactcctggaatgccacccactaagaaacattgtctgacaccaactccccacttggtaggtggggacactgaaactcatggcaggaaagggccttgccccaagccagggcagagtgtcactcatcactctcaattttcagtccagggcaccttgttgtgactatcccaaaggcagccactttccctggtctgaaagacctgaagagagaagagaagagaaggatggaaggcagagtatgcggctttgattcatttcctggtgaaaacagatctatacgagaagcaaatttcacgaaagggaagagaagaaagtgtcccatacgttgctggcctgtttcaaccttgctttgattcttgctgaaaagggtaccgtgtatttctgagttcaacatgcagaccagtgttaggaaagccactgcacctccactttagcctccagggctgtgccctgcaaatggcctgcagccttggtgcctcgctctccagactgcattttggaagatgggacagaggcttatggaagcccacattagaacgggggagcagaatgggtgagatgagggatccttgatagtgaaccagatgaaggaatggtagccaaatgccaggcctcctttgtggcttcaatccaaaggctctggagcccttccagggcagaacatcaggcatgtttacccccactgtcctcaacagtgacagaggtgcaatcttgggcagctggccattttgaaagcaacctccttaatctcaactgggaaggctccctagcaggacccctgtgttgcacacctggaggaagctagactaaccagaagctcagcacggttccatctgggatgcccaggtctgagacgaaaaaggtaactctcttttctgggtcctggcccagttgtgtctctctccacctcattctctgagatgcctgtctccccttttttgtcccatcaggaggcaagagctatcactgggccagactccaccagaagccaagccagcttgttacccagcttctcagggagcaaagaacagccttgtttctatcttatccccactgtcccctgcccctgccccacctcccagccattcagcttctggcttccccagagctgcctgcttctttgtggtcctccattccttgaaaagaccttctagtcattagtgtatataaatggccacttagcccagattacagtgaggtcaacagctggggctctgagaattgtcacacactggcacaggagaggaggctattcttccagagaatttggagggcactcccatccacttacaacaaaaagcccatccactgtgcttggcagtaggtgatctgagaaccaatggaaccaggttaatcctgtggcactgttgagtgaggagagcagtggcgggcactggaaaatatcagagacaaggcaggagacctgaaatctaggcttagctcctcatatacttggcagctgtatgacctcagacaaccagtgttacctctctaagcctcagtttcctcatgcaaaaggagggggaataacaacagagcccactgcttgggggtgttgtgaggacaggatgaaaaaacaaacagaaatccctcagtacaggattcagtgcagtggacagtcttgcaaggtctggttcagccctccacccctaccctcaccagtataaagaactctggcctacaagtcagatgacctgagttttaatctcagctttgccattagccgtgtgaacttgagaaagtccctttcctttttacatctattgggatgatcatgcattttttgtcctttattctgttaatatagtgtgttacattgattgcttttcatagactgaaccagccttgtattccagggataaatctcacttggtcatggtgtataatcctttatacaaatgttgctgggttgagtttgctagtattttgttgaagatttttatgtcttgattcataaggaatattggtgtaccttccccttttatggccacagtttccctacaatgatgtagtcgaactagacaacctccaatatctttcagtattcatgtcctctgattctgtgaaactaagaaaattaagaaatagtgattcataggcacaaggcaggcaaaacttagactccttgtagaataattaggaagccaaatattcagtgtgcttatttctcaaataaccttagtttctccagtctgccccaactccgaggcctgaatatctctagatgcttatgatggcaactaaagcctaaaagctaattcattttaaagttcttccaaatgcatagggttttatttttccagacctgggttcagatggggaatttgacaaacaatggaaagggggaaaaacaacaatctaaacactgagtgacaaagtaacaaagaaatagtctagctatcagccagtcaagccagccttggctttgctatccaaagtagtcagtctaattctaccaccagtttctgttcctgtagctgtctactgcctgccagggactctgccttcccacccacaactaccaatggaaggatgtggtgaccataccagtggctgctgacatctcctgccatgggaagcataattgcctccagcagcctcccccttagatccatcatttttgttgcacttggcctgggctgtactcccggccaatgactgaacatggtgagcatagtaatgcaggcccatttctgtgaggagcaggactcctccagtaggtgactttggctcaaggactctctattggcctggttgaacttttcctgaactgtgctactgtctgagactcttcttacccaatcctctttctcgccccaattgtcacagaccacctgcattgtggtctgagtctctccccaccttctcttgctcttccctgtttatctttcacaggcatttcccccagtacattccttgaatgtctaacccgatacgggtgcctgacttttggcagacctaagcagacaaaaaggagtacttggttacctagctcttctttctaccacaaacatcgagggaaccctttttccctcacccctctgccacacccccactgccccagtgaacaaccacagagagagctgtggtataatattaggctggtgcaaaagtaattgcggtttttgccattacttttaatggtaaaaaccgcaattacttttgcacctacctagtatttgtgtccccccaaattcatatgttgaaacctaacccacaatatgatgtcattaggaggcaagaccttgaggaggtgattagatgatggggtggagctctcctgaatgagattagtgcccttataagaagaagcccaaggaagctaccttgactcttccatcacatgagaatgcagcaagaaggcaccatctactaatcaggaagagagctctcaccagacactgaatctgccagtgtcttgatcttgaagttcccagcctccagaactatgcataatgcatttccattgtctctaagccacccagcctatggtattttgtcatagcagcctgaactgactaagacagtgagccacatgagaagtgccccaacccctcccttaagcacttggctcacagatcagtgggttcatttctgcctgagttttattgttattctgtagatttcttgggctagatatatttttctgttattttccttcttcacctcagtcatgaattggttgttttaaaaaagacaatgtaagtcatggggaaactcctgacaactctactctcctagggttcctgataaaaggggattcagttgagtcctctgatggtctctacctgccaaagtccagcagcccttagcaaacatgctgctcgtttctgtagagaaggtgctggtgtcccaccatacttctctctccctcatgaagggcttgcgacccagcaaatgggtggcttatatgggtctgtttcaaaggaagagccagctctgggaagaaaaacgatgagcataagcataacctaccactgtgcctgggaaagcagacaacttttttgatgtgtgaatatctaatgagaatggaatccatcaattaccttaaacttaggcacagtcttcaaattcaatatatgtgggatatacttttagtcagtttgtagacgttatttgtaataaataatctggcttctctaaagaaattattttaagtgtttggtttggtttgatttaatggtaaaattatatttagtggcagagaattatagcaatggtgataaactatagagtgtcataagttcatatcttattctcacatttgaagctgcctgcagatgcattcaagatgcagccagaagtcaggagactcaggctgttatttggagctcatcattttacagccttgctggactcccactttctcaggggaaaaatgtggtgttgacccagattagctctccaggccctgctgagttgggcactctgtaagctggagggtcttctattgtcttcacctaagtgtcaatcaacaacccaaatgggcatgggggaagagggagctgggccaatgcccagggtgcctggtagagagataccttgggcactggaaggcaccagcttcccagagagaagggggagggccatgaaaaagttggctgtagatgccagggacactgggactctccagctgtgtgtttgtgtcttctgaagacttatgtttcattcctttggagcatgcataatcatacactgtgggatgtgttatatagattgcttgatagttcaccactgtaataaaatactgtgactggaatctgctcccagtctgcctttgatagcacttgtgcaacacacatttactgagcatttacagtgatccaggacctgtgttgtgaaaacattgatggacaaggcagatggtggagcacgtcagtgaggatttttaacaaaggctggtaagtgctataaaggaacattgtaggacactagagaacaaagaacaggagaacctgacttaggctggggtggggcgttggttagaggaggctccttggaggacatgaggtttaagctgtgacctgaggatgaatagatgttggccaggtgaggtaccggtatttgtcagccttaccagtaaaaaagaaaacctattaaaaaaaaaatacacatacaaagcctcatcagccatggcttaccagagaaagtacagcgggcacacaaaccacaagctctaaagtcactctccaacctctccacaatatatatacacaagccctaaactgacgtaatgggactaaagtgtaaaaaatcccgccaaacccaacacacaccccgaaactgcgtcaccagggaaaagtacagtttcacttccgcaatcccaacaagcgtcacttcctctttctcacggtacgtcacatcccattaacttacaacgtcattttcccacggccgcgccgccccttttaaccgttaaccccacagccaatcaccacacggcccacactttttaaaatcacctcatttacatattggcaccattccatctataaggtatattattgatgatg

SEQ ID NO: 193 - DNA, 20 bp, Artificial Sequence
  synthesized
ctgctgtgggcaggtgagtg

SEQ ID NO: 194 - RNA, 23 nt, Artificial Sequence
  CD33 E1 splic donor site
ccccugcugugggcaggugagug

SEQ ID NO: 195 - RNA, 23 nt, Artificial Sequence
  CD33_stop_E2
ccccaguucaugguuacugguuc
